(19) United States
(12) Patent Application Publication
(10) Pub. No.: US 2003/0166903 A1
(43) Pub. Date: Sep. 4, 2003

(54) Genes associated with vascular disease

(76) Inventors: Anna Astromoff, San Carlos, CA (US); Olga Bandman, Mountain View, CA (US); Benjamin G. Cocks, Sunnyvale, CA (US)

Correspondence Address: LEGAL DEPARTMENT, INCYTE GENOMICS, INC., 3160 PORTER DRIVE, PALO ALTO, CA, 94304, US

(21) Appl. No.: 10/133,013

(22) Filed: Apr. 25, 2002

Related U.S. Application Data
(60) Provisional application No. 60/287,067, filed on Apr. 27, 2001.

(51) Int. Cl. C07H 21/04; C12Q 1/68; C12P 19/34

(52) U.S. Cl. 536/23.2; 435/6; 435/91.2

(57) ABSTRACT

The present invention relates to a combination comprising a plurality of cDNAs which are differentially expressed in vascular endothelium and which may be used in their entirety or in part to diagnose, to stage, to treat, or to monitor the treatment of a subject with a vascular disorder.

[0001] This application claims benefit of provisional application Serial No. 60/287,067, filed Apr. 27, 2001.

### FIELD OF THE INVENTION

[0002] The present invention relates to a combination comprising a plurality of cDNAs which are differentially expressed in vascular endothelium and which may be used entirely or in part to diagnose, to stage, to treat, or to monitor the progression or treatment of disorders of the vascular system including atherosclerosis, diabetic retinopathy, endometriosis, obesity, and cancer.

### BACKGROUND OF THE INVENTION

[0003] The blood vessel wall is a complex tissue that plays a critical role in numerous physiological processes such as maintaining blood pressure, controlling selective permeability, directing vessel remodeling and angiogenesis, and modulating inflammatory and immune responses. Vessel walls are composed of three morphologically distinct layers, the intima, media, and adventitia, arranged concentrically from the lumenal surface outward. The intima is comprised of an endothelial cell (EC) layer in direct contact with the blood, surrounded by a layer of subendothelial connective tissue, within which lies the internal elastic lamina. The media is comprised of vascular smooth muscle cells (VSMC) and elastic fibrous components. The adventitia is comprised of the external elastic lamina surrounded on the outside by a layer of extracellular matrix components interspersed with fibroblasts and smooth muscle cells.

[0004] During embryonic development, blood vessels are formed de novo by vasculogenesis, the assembly of endothelial precursors. Later, the primitive vascular tree is expanded by angiogenesis, the development of new vessels from preexisting vessels. New vessels are formed both by sprouting of branches (sprouting angiogenesis) and by the partitioning of preexisting vessels via insertion of interstitial tissue columns (intussuseption). In adults, angiogenesis occurs normally during wound healing and during the menstrual cycle when the corpus luteum is formed. A key stimulus for angiogenesis is the production of a signal from hypoxic or otherwise stressed tissues that is detected by receptors on nearby microvascular endothelial cells. The first such signal to be identified was the angiogenesis inducing molecule vascular endothelial growth factor (VEGF).

[0005] Blood vessel structure and function vary considerably in different parts of the vascular tree. For example, vessel diameter and wall thickness decrease, along with changes in wall composition with increasing distance from the heart. Arterial walls are relatively thick compared with their venous counterparts, enabling them to withstand the higher blood pressures and shear forces to which they are exposed. The walls of the largest “elastic arteries” close to the heart have a thick medial layer, rich in elastic fibers which allow it to expand and contract with the heart. These elastic components are lacking in the small arteriole walls which play a major role in systemic blood pressure regulation. At the level of the microvascular capillary beds, where vessels have a diameter of about 7-8 μm, vessels are composed of a simple endothelial cell layer with a basement membrane composed primarily of type IV collagen.

[0006] Different types of capillary walls can be distinguished based on the degree of continuity and basement membrane composition.

[0007] Differences in vessel wall structure and function influence the diseases with which particular vessels are associated. For example, tumor angiogenesis and diabetic retinopathy are pathological conditions associated with abnormal growth of microvascular endothelium. By contrast, atherosclerosis affects the large elastic and muscular arteries such as the aorta and carotid, iliac, coronary, and popliteal arteries, but does not affect small muscular arteries or arterioles, large or small veins, or microvascular tissues.

[0008] Atherosclerosis and the associated coronary artery disease and cerebral stroke represent the most common causes of death in industrialized nations. Atherosclerosis is a progressive disease characterized by a chronic local inflammatory response within the vessel wall of large arteries (Lusis (2000) Nature 407:233-241). Although certain key risk factors have been identified, a full molecular characterization that elucidates the causes and identifies all potential therapeutic targets for this complex disease has not been achieved. Pathological angiogenesis occurs in numerous conditions such as diabetic retinopathy, endometriosis, obesity, and cancer (Carmeliet et al. (2000) Nature 407:249-257). The demonstration that tumor induced angiogenesis is a critical stage in tumor progression, potentially amenable to clinical intervention, has led to a great deal of interest in factors which mediate tumor angiogenesis. Molecules involved in angiogenesis act to stimulate endothelial proliferation, migration, and morphogenesis, and remodel extracellular matrix.

[0009] A number of primary endothelial cell lines are available to study vascular endothelial cell function. Primary cells derived from the endothelia of human aorta (HAEC), coronary artery (HCAEC), iliac artery (HIAEC), brain microvasculature, (HMVECB), neonatal dermal microvasculature (HMVECD), pulmonary artery (HPAEC), umbilical artery (HUAEC), umbilical vein (HUVEC), and uterine myometrium microvasculature (UtMVEC) have all been used as experimental models for investigating in vitro the role of the endothelium in human vascular biology.

[0010] Array technology can provide a simple way to explore the expression of a single polymorphic gene or to produce an expression profile of a large number of related or unrelated genes. Arrays provide a platform for examining which genes are tissue specific, carrying out housekeeping functions, parts of a signaling cascade, or specifically related to a particular genetic predisposition, condition, disease, or disorder. The potential application of gene expression profiling is particularly relevant to improving diagnosis, prognosis, and treatment of disease. For example, both the levels and sequences expressed in vascular endothelium from subjects with atherosclerosis may be compared with the levels and sequences expressed in normal vascular tissue.

[0011] The present invention provides for a combination comprising a plurality of cDNAs for use in detecting changes in expression of genes encoding proteins that are associated with a vascular disorder. The present invention satisfies a need in the art by identifying differentially expressed genes which may be used entirely or in part to diagnose, to stage, to treat, or to monitor the progression or treatment of a subject with a vascular disorder such as atherosclerosis, diabetic retinopathy, endometriosis, obesity, and cancer.

### SUMMARY

[0012] The present invention provides a combination comprising a plurality of cDNAs and their complements which are differentially expressed in vascular endothelial tissues and which are selected from SEQ ID NOs:1-292 as presented in the Sequence Listing. In one embodiment, each cDNA is expressed at higher levels in microvascular endothelium, SEQ ID NOs:1-209; in another embodiment, each cDNA is expressed at higher levels in large artery endothelium, SEQ ID NOs:210-292. In one aspect, the combination is useful to diagnose a vascular disorder selected from atherosclerosis, hemangioma, hemangioendothelioma, diabetic retinopathy, warts, pyogenic granulomas, Kaposi's sarcoma, scar keloids, allergic oedema, neoplasms, psoriasis, ulcers, follicular cysts, endometriosis, peritoneal sclerosis, and obesity. In another aspect, the combination is immobilized on a substrate.

[0013] The invention also provides a high throughput method to detect differential expression of one or more of the cDNAs of the combination. The method comprises hybridizing the substrate comprising the combination with the nucleic acids of a sample, thereby forming one or more hybridization complexes, detecting the hybridization complexes, and comparing the hybridization complexes with those of a standard, wherein differences in the size and signal intensity of each hybridization complex indicates differential expression of nucleic acids in the sample. In one aspect, the sample is from a subject with a vascular disorder and differential expression determines an early, mid, and late stage of the disorder.

[0014] The invention further provides a high throughput method of screening a library or a plurality of molecules or compounds to identify a ligand. The method comprises combining the substrate comprising the combination with a library or a plurality of molecules or compounds under conditions to allow specific binding and detecting specific binding, thereby identifying a ligand. The library or plurality of molecules or compounds are selected from DNA molecules, enhancers, mimetics, peptide nucleic acids, proteins, repressors, regulatory proteins, RNA molecules, and transcription factors. The invention additionally provides a method for purifying a ligand, the method comprising combining a cDNA of the invention with a sample under conditions which allow specific binding, recovering the bound cDNA, and separating the cDNA from the ligand, thereby obtaining purified ligand.

[0015] The invention provides an isolated cDNA selected from SEQ ID NOs:36, 51, 61, 83, 87, 110, 111, 136, 159, 198, and 244 as presented in the Sequence Listing. The invention also provides a vector comprising the cDNA, a host cell comprising the vector, and a method for producing a protein comprising culturing the host cell under conditions for the expression of a protein and recovering the protein from the host cell culture. The invention provides a method for using an isolated cDNA to detect differential gene expression in a sample, the method comprising hybridizing a cDNA having a nucleotide sequence selected from SEQ ID NOs:36, 51, 61, 83, 87, 110, 111, 136, 159, 198, and 244 with a sample containing nucleic acids, thereby forming a hybridization complex, and comparing hybridization complex formation with complex formation in a normal standard, wherein differences in complex formation indicate differential expression of the nucleic acid in the sample. In one aspect, the sample is from vascular tissue or a patient with a vascular disorder. In another aspect, the nucleic acids of the sample are amplified prior to hybridization.

[0016] The present invention provides a purified protein encoded and produced by a cDNA of the invention. The invention also provides a high-throughput method for using a protein to screen a library or a plurality of molecules or compounds to identify a ligand. The method comprises combining the protein or a portion thereof with the library or plurality of molecules or compounds under conditions to allow specific binding and detecting specific binding, thereby identifying a ligand which specifically binds the protein. The library or plurality of molecules or compounds is selected from agonists, antagonists, antibodies, DNA molecules, small molecule drugs, immunoglobulins, inhibitors, mimetics, peptide nucleic acids, peptides, pharmaceutical agents, proteins, RNA molecules, and ribozymes.

[0017] The invention provides a method for using the protein to produce an antibody which specifically binds the protein. The method for preparing a polyclonal antibody comprises immunizing a animal with protein under conditions to elicit an antibody response, isolating animal antibodies, attaching the protein to a substrate, contacting the substrate with isolated antibodies under conditions to allow specific binding to the protein, dissociating the antibodies from the protein, thereby obtaining purified polyclonal antibodies. The method for preparing a monoclonal antibodies comprises immunizing a animal with a protein under conditions to elicit an antibody response, isolating antibody producing cells from the animal, fusing the antibody producing cells with immortalized cells in culture to form monoclonal antibody producing hybridoma cells, culturing the hybridoma cells, and isolating monoclonal antibodies from culture.

[0018] The invention provides purified antibodies which bind specifically to a protein. The invention also provides a method for using an antibody to detect expression of a protein in a sample, the method comprising combining the antibody with a sample under conditions for formation of antibody:protein complexes, and detecting complex formation, wherein complex formation indicates expression of the protein in the sample. In one aspect, the amount of complex formation when compared to standards is diagnostic of vascular disorders.

[0019] The invention provides a method for immunopurification of a protein comprising attaching an antibody to a substrate, exposing the antibody to a sample containing protein under conditions to allow antibody:protein complexes to form, dissociating the protein from the complex, and collecting purified protein. The invention also provides an array upon which a cDNA encoding a protein, the protein, or an antibody which specifically binds the protein are immobilized. The invention also provides a composition comprising a cDNA, a protein, an antibody, or a ligand which has agonistic or antagonistic activity.

### DESCRIPTION OF THE COMPACT DISC-RECORDABLE (CD-R)

[0020] CD-R 1 is labeled: “PA-0049 US, Copy 1,” was created on Apr. 25, 2002 and contains: the Sequence Listing formatted in plain ASCII text. The file for the Sequence Listing is entitled pa0049sl.txt, created on Apr. 25, 2002 and is 716 KB in size.

[0021] CD-R 2 is an exact copy of CD-R 1. CD-R 2 is labeled: “PA-0049 US, Copy 2,” and was created on Apr. 25, 2002.

[0022] The CD-R labeled as: “PA-0049 US, CRF,” contains the Sequence Listing formatted in plain ASCII text. The file for the Sequence Listing is entitled pa0049sl.txt, was created on Apr. 25, 2002 and is 716 KB in size.

[0023] The content of the Sequence Listing named above and as described below, submitted in duplicate on two (2) CD-Rs (labeled “PA-0049 US, Copy 1” and “PA-0049 US, Copy 2”), and the CRF (labeled “PA-0049 US, CRF”) containing the Sequence Listing, are incorporated by reference herein, in their entirety.]

### DESCRIPTION OF THE SEQUENCE LISTING AND TABLES

[0024] A portion of the disclosure of this patent document contains material that is subject to copyright protection. The copyright owner has no objection to the facsimile reproduction by anyone of the patent document or the patent disclosure, as it appears in the Patent and Trademark Office patent file or records, but otherwise reserves all copyright rights whatsoever.

[0025] The Sequence Listing is a compilation of cDNAs obtained by sequencing and extending clone inserts. Each sequence is identified by a sequence identification number (SEQ ID NO) and by the Incyte template number (Incyte ID) from which it was obtained.

[0026] Tables 1, 2, and 3 show the differential expression of clones representing the cDNAs of the present invention. Each clone in Tables 1 and 2 represents a gene expressed at higher levels in microvascular endothelium relative to non-microvascular endothelium. Each clone in Table 3 represents a gene expressed at higher levels in large artery endothelium relative to microvascular and umbilical vein endothelium. Ratios are reported as log base 2; negative values indicate greater expression in the specific endothelial sample relative to the control. In Tables 1 and 3, column 1 shows the Clone ID for the clone present on the microarray and columns 2-10 show the differential expression value for the clone in specific regions of vascular endothelium relative to a vascular endothelium pooled control. In Table 2, column 1 shows the Clone ID for the clone present on the microarray, column 2 shows the average expression of the cDNA in microvascular endothelium and umbilical vein relative to the pooled control, column 3 shows the average expression in large artery endothelium relative to the pooled control, and column 4 shows the difference between microvascular/umbilical vein and large artery expression.

[0027] Table 4 shows the region of each cDNA encompassed by the clone present on a microarray and identified as differentially expressed. Columns 1 and 2 show the SEQ ID NO and Template ID, respectively. Column 3 shows the Clone ID and columns 4 and 5 show the first residue (START) and last residue (STOP) encompassed by the clone on the template.

[0028] Table 5 lists the functional annotation of the cDNAs of the present invention. Columns 1 and 2 show the SEQ ID NO and Template ID, respectively. Columns 3, 4, and 5 show the nearest GenBank homolog (hit; GI Number), probability score (E-value), and functional annotation, respectively, as determined by BLAST analysis (version 2.0 using default parameters; Altschul et al. (1997) Nucleic Acids Res 25:3389-3402; Altschul (1993) J Mol Evol 36:290-300; and Altschul et al. (1990) J Mol Biol 215:403-410) of the cDNA against GenBank (release 122; National Center for Biotechnology Information (NCBI), Bethesda Md.).

### DESCRIPTION OF THE INVENTION

[0029] Definitions

[0030] “Antibody” refers to intact immunoglobulin molecule, a polyclonal antibody, a monoclonal antibody, a chimeric antibody, a recombinant antibody, a humanized antibody, single chain antibodies, a Fab fragment, an F(ab)₂ fragment, an Fv fragment; and an antibody-peptide fusion protein.

[0031] “Antigenic determinant” refers to an antigenic or immunogenic epitope, structural feature, or region of an oligopeptide, peptide, or protein which is capable of inducing formation of an antibody which specifically binds the protein. Biological activity is not a prerequisite for immunogenicity.

[0032] “Array” refers to an ordered arrangement of at least two cDNAs, proteins, or antibodies on a substrate. At least one of the cDNAs, proteins, or antibodies represents a control or standard, and the other cDNA, protein, or antibody of diagnostic or therapeutic interest. The arrangement of at least two and up to about 40,000 cDNAs, proteins, or antibodies on the substrate assures that the size and signal intensity of each labeled complex, formed between each cDNA and at least one nucleic acid, each protein and at least one ligand or antibody, or each antibody and at least one protein to which the antibody specifically binds, is individually distinguishable.

[0033] A “combination” comprises at least two and up to about 584 sequences selected from the group consisting of SEQ ID NOs:1-292 and their complements as presented in the Sequence Listing.

[0034] “cDNA” refers to an isolated polynucleotide, nucleic acid, or a fragment thereof, that contains from about 400 to about 12,000 nucleotides. It may have originated recombinantly or synthetically, may be double-stranded or single-stranded, represents coding and noncoding 3′ or 5′ sequence, generally lacks introns and may be purified or combined with carbohydrate, lipids, protein or inorganic elements or substances.

[0035] The phrase “cDNA encoding a protein” refers to a nucleic acid whose sequence closely aligns with sequences that encode conserved regions, motifs or domains identified by employing analyses well known in the art. These analyses include BLAST (Basic Local Alignment Search Tool; Altschul, supra; Altschul (1990) supra) which provides identity within the conserved region. Brenner et al. (1998; Proc Natl Acad Sci 95:6073-6078) who analyzed BLAST for its ability to identify structural homologs by sequence identity found 30% identity is a reliable threshold for sequence alignments of at least 150 residues and 40% is a reasonable threshold for alignments of at least 70 residues (Brenner, page 6076, column 2).

[0036] “Derivative” refers to a cDNA or a protein that has been subjected to a chemical modification. Derivatization of a cDNA can involve substitution of a nontraditional base such as queosine or of an analog such as hypoxanthine. These substitutions are well known in the art. Derivatization of a protein involves the replacement of a hydrogen by an acetyl, acyl, alkyl, amino, formyl, or morpholino group. Derivative molecules retain the biological activities of the naturally occurring molecules but may confer longer lifespan or enhanced activity.

[0037] “Differential expression” refers to an increased or upregulated or a decreased or downregulated expression as detected by absence, presence, or at least two-fold change in the amount of transcribed messenger RNA or translated protein in a sample.

[0038] “Disorder” refers to conditions, diseases or syndromes of the vascular endothelium including disorders of increased vascularization such as atherosclerosis, hemangioma, hemangioendothelioma, diabetic retinopathy, warts, pyogenic granulomas, Kaposi's sarcoma, scar keloids, allergic oedema, neoplasms, follicular cysts, endometriosis, peritoneal sclerosis, and obesity; disorders of insufficient vascularization such as ulcers; and disorders of abnormal remodeling such as psoriasis.

[0039] An “expression profile” is a representation of gene expression in a sample. A nucleic acid expression profile is produced using sequencing, hybridization, or amplification technologies and mRNAs or cDNAs from a sample. A protein expression profile, although time delayed, mirrors the nucleic acid expression profile and uses PAGE, ELISA, FACS, or arrays and labeling moieties or antibodies to detect expression in a sample. The nucleic acids, proteins, or antibodies may be used in solution or attached to a substrate, and their detection is based on methods and labeling moieties well known in the art.

[0040] “Fragment” refers to a chain of consecutive nucleotides from about 60 to about 5000 base pairs in length. Fragments may be used in PCR, hybridization or array technologies to identify related nucleic acids and in binding assays to screen for a ligand. Such ligands are useful as therapeutics to regulate replication, transcription or translation.

[0041] A “hybridization complex” is formed between a cDNA and a nucleic acid of a sample when the purines of one molecule hydrogen bond with the pyrimidines of the complementary molecule, e.g., 5′-A-G-T-C-3′ base pairs with 3′-T-C-A-G-5′. The degree of complementarity and the use of nucleotide analogs affect the efficiency and stringency of hybridization reactions.

[0042] “Identity” as applied to sequences, refers to the quantification (usually percentage) of nucleotide or residue matches between at least two sequences aligned using a standardized algorithm such as Smith-Waterman alignment (Smith and Waterman (1981) J Mol Biol 147:195-197), CLUSTALW (Thompson et al. (1994) Nucleic Acids Res 22:4673-4680), or BLAST2 (Altschul (1997) supra). BLAST2 may be used in a standardized and reproducible way to insert gaps in one of the sequences in order to optimize alignment and to achieve a more meaningful comparison between them. “Similarity” as applied to proteins uses the same algorithms but takes into account conservative substitutions of nucleotides or residues.

[0043] “Isolated” or “purified” refers to any molecule or compound that is separated from its natural environment and is from about 60% free to about 90% free from other components with which it is naturally associated.

[0044] “Labeling moiety” refers to any reporter molecule whether a visible or radioactive label, stain or dye that can be attached to or incorporated into a cDNA or protein. Visible labels and dyes include but are not limited to anthocyanins, β glucuronidase, BIODIPY, Coomassie blue, Cy3 and Cy5, digoxigenin, FITC, green fluorescent protein, luciferase, spyro red, silver, and the like. Radioactive markers include radioactive forms of hydrogen, iodine, phosphorous, sulfur, and the like.

[0045] “Large artery endothelium” includes vascular endothelium obtained from aorta, coronary artery, pulmonary artery, and iliac artery.

[0046] “Ligand” refers to any agent, molecule, or compound which will bind specifically to a complementary site on a cDNA molecule or polynucleotide, or to an epitope or a protein. Such ligands stabilize or modulate the activity of polynucleotides or proteins and may be composed of inorganic or organic substances including nucleic acids, proteins, carbohydrates, fats, and lipids.

[0047] “Microvascular endothelium” includes vascular endothelium obtained from neonatal dermis and uterine myometrium.

[0048] “Neoplasms” may include adenocarcinoma, leukemia, lymphoma, melanoma, myeloma, sarcoma, teratocarcinoma, and, in particular, cancers of the adrenal gland, bladder, bone, bone marrow, brain, breast, cervix, colon, esophagus, gall bladder, ganglia, heart, kidney, liver, lung, muscle, ovary, pancreas, parathyroid, penis, prostate, rectum, salivary glands, skin, small intestine, spleen, stomach, testis, thymus, thyroid, and uterus.

[0049] “Non-microvascular endothelium” includes large artery endothelium and vascular endothelium obtained from umbilical artery and vein.

[0050] “Oligonucleotide” refers a single stranded molecule from about 18 to about 60 nucleotides in length which may be used in hybridization or amplification technologies or in regulation of replication, transcription or translation. Equivalent terms include amplimer, primer, and oligomer.

[0051] “Portion” refers to any part of a protein used for any purpose which retains at least one biological or antigenic characteristic of a native protein, but especially, to an epitope for the screening of ligands or for production of antibodies.

[0052] “Post-translational modification” of a protein can involve lipidation, glycosylation, phosphorylation, acetylation, racemization, proteolytic cleavage, and the like. These processes may occur synthetically or biochemically. Biochemical modifications will vary by cellular location, cell type, pH, enzymatic milieu, and the like.

[0053] “Probe” refers to a cDNA that hybridizes to at least one nucleic acid in a sample. Where targets are single stranded, probes are complementary single strands. Probes can be labeled for use in hybridization reactions including Southern, northern, in situ, dot blot, array, and like technologies or in screening assays.

[0054] “Protein” refers to a polypeptide or any portion thereof. An “oligopeptide” is an amino acid sequence from about five residues to about 15 residues that is used as part of a fusion protein to produce an antibody.

[0055] “Sample” is used in its broadest sense as containing nucleic acids, proteins, antibodies, and the like. A sample may comprise a bodily fluid such as ascites, blood, lymph, saliva, semen, spinal, sputum, tears, and urine; the soluble fraction of a cell preparation, or an aliquot of media in which cells were grown; a chromosome, an organelle, or membrane isolated or extracted from a cell; genomic DNA, RNA, or cDNA in solution or bound to a substrate; a cell; a tissue or tissue biopsy; a tissue print; buccal cells, skin, a hair or its follicle; and the like.

[0056] “Specific binding” refers to a special and precise interaction between two molecules which is dependent upon their structure, particularly their molecular side groups. For example, the intercalation of a regulatory protein into the major groove of a DNA molecule, the hydrogen bonding along the backbone between two single stranded nucleic acids, or the binding between an epitope of a protein and an agonist, antagonist, or antibody.

[0057] “Substrate” refers to any rigid or semi-rigid support to which cDNAs or proteins are bound and includes membranes, filters, chips, slides, wafers, fibers, magnetic or nonmagnetic beads, gels, capillaries or other tubing, plates, polymers, and microparticles with a variety of surface forms including wells, trenches, pins, channels and pores.

[0058] A “transcript image” (TI) is a profile of gene transcription activity in a particular tissue at a particular time. TI provides assessment of the relative abundance of expressed polynucleotides in the cDNA libraries of an EST database as described in U.S. Pat. No. 5,840,484, incorporated herein by reference.

[0059] “Variant” refers to molecules that are recognized variations of a cDNA or a protein encoded by the cDNA. Splice variants may be determined by BLAST score, wherein the score is at least 100, and most preferably at least 400. Allelic variants have a high percent identity to the cDNAs and may differ by about three bases per hundred bases. “Single nucleotide polymorphism” (SNP) refers to a change in a single base as a result of a substitution, insertion or deletion. The change may be conservative (purine for purine) or non-conservative (purine to pyrimidine) and may or may not result in a change in an encoded amino acid.

[0060] The Invention

[0061] The present invention provides for a combination comprising a plurality of cDNAs and their complements, SEQ ID NOs:1-292, which may be used to diagnose, to stage, to treat, or to monitor the progression or treatment of a vascular disorder. These cDNAs represent known and novel genes differentially expressed in vascular endothelium from microvascular and non-microvascular tissues. The combination may be used in its entirety or in part, as subsets of cDNAs expressed at higher levels in microvascular endothelium, SEQ ID NOs:1-209, or of cDNAs expressed at higher levels in large artery endothelium, SEQ ID NOs:210-292. SEQ ID NOs:36, 51, 61, 83, 87, 110, 111, 136, 159, 198, and 244 represent novel cDNAs differentially expressed in vascular endothelium. Since the novel cDNAs were identified solely by their differential expression, it is not essential to know a priori the name, structure, or 40 function of the gene or its encoded protein. The usefulness of the novel cDNAs exists in their immediate value as diagnostics for vascular disorders.

[0062] Tables 1, 2, and 3 show the differential expression of clones representing the cDNAs of the present invention on microarrays. Each clone in Tables 1 and 2 represents a gene expressed at higher levels in microvascular endothelium relative to non-microvascular endothelium. Each clone in Table 3 represents a gene expressed at higher levels in large artery endothelium relative to microvascular endothelium and umbilical vein. Ratios are reported as log base 2; negative values indicate greater expression in the specific endothelial sample relative to the control.

[0063] In Tables 1 and 3, column 1 shows the clone ID and columns 2-10 show the differential expression value for the clone in specific regions of vascular endothelium relative to a vascular endothelium pooled control. The vascular endothelium represented in columns 2-10 are aorta (HAEC), coronary artery (HCAEC), pulmonary artery (HPAEC), iliac artery (HIAEC), uterine myometrium microvasculature (UtMVEC), neonatal dermal microvasculature (HMVECD), umbilical artery (HUAEC), and umbilical vein (HUVEC; three separate samples), respectively. In Table 2, column 1 shows the Clone ID for the clone present on the microarray, column 2 shows the average expression of the cDNA in microvascular and umbilical vein endothelium relative to the pooled control, column 3 shows the average expression in large artery endothelium relative to the pooled control, and column 4 shows the difference between microvascular/umbilical vein and large artery expression.

[0064] Table 4 shows the region of each cDNA encompassed by the clone present on a microarray and identified as differentially expressed. Columns 1 and 2 show the SEQ ID NO and template ID, respectively. Column 3 shows the clone ID and columns 4 and 5 show the first residue (START) and last residue (STOP) encompassed by the clone on the template.

[0065] Table 5 lists the functional annotation of the cDNAs of the present invention. Columns 1 and 2 show the SEQ ID NO and template ID, respectively. Columns 3, 4, and 5 show the GenBank homolog (hit), probability score (E-value), and functional annotation, respectively, as determined by BLAST analysis (version 2.0 using default parameters; Altschul (1997) supra) of the cDNA against GenBank (release 122; NCBI).

[0066] The cDNAs of the invention define a differential expression pattern against which to compare the expression pattern of biopsied and/or in vitro treated vascular tissues. Experimentally, differential expression of the cDNAs can be evaluated by methods including, but not limited to, differential display by spatial immobilization or by gel electrophoresis, genome mismatch scanning, representational discriminant analysis, clustering, transcript imaging and array technologies. These methods may be used alone or in combination.

[0067] The combination may be arranged on a substrate and hybridized with tissues from subjects with diagnosed vascular disorders to identify those sequences which are differentially expressed in, e.g., both atherosclerosis and other vascular disorders. This allows identification of those sequences of highest diagnostic and potential therapeutic value. In one embodiment, an additional set of cDNAs, such as cDNAs encoding signaling molecules, are arranged on the substrate with the combination. Such combinations may be useful in the elucidation of pathways which are affected in a particular disorder or to identify new, coexpressed, candidate, therapeutic molecules.

[0068] In another embodiment, the combination can be used for large scale genetic or gene expression analysis of a large number of novel, nucleic acids. These samples are prepared by methods well known in the art and are from mammalian cells or tissues which are in a certain stage of development; have been treated with a known molecule or compound, such as a cytokine, growth factor, a drug, and the like; or have been extracted or biopsied from a mammal with a known or unknown condition, disorder, or disease before or after treatment. The sample nucleic acids are hybridized to the combination for the purpose of defining a novel gene profile associated with that developmental stage, treatment, or disorder.

[0069] cDNAs and Their Uses

[0070] cDNAs can be prepared by a variety of synthetic or enzymatic methods well known in the art. cDNAs can be synthesized, in whole or in part, using chemical methods well known in the art (Caruthers et al. (1980) Nucleic Acids Symp Ser (7):215-233). Alternatively, cDNAs can be produced enzymatically or recombinantly, by in vitro or in vivo transcription.

[0071] Nucleotide analogs can be incorporated into cDNAs by methods well known in the art. The only requirement is that the incorporated analog must base pair with native purines or pyrimidines. For example, 2, 6-diaminopurine can substitute for adenine and form stronger bonds with thymidine than those between adenine and thymidine. A weaker pair is formed when hypoxanthine is substituted for guanine and base pairs with cytosine. Additionally, cDNAs can include nucleotides that have been derivatized chemically or enzymatically.

[0072] cDNAs can be synthesized on a substrate. Synthesis on the surface of a substrate may be accomplished using a chemical coupling procedure and a piezoelectric printing apparatus as described by Baldeschweiler et al. (PCT publication WO95/251116). Alternatively, the cDNAs can be synthesized on a substrate surface using a self-addressable electronic device that controls when reagents are added as described by Heller et al. (U.S. Pat. No. 5,605,662). cDNAs can be synthesized directly on a substrate by sequentially dispensing reagents for their synthesis on the substrate surface or by dispensing preformed DNA fragments to the substrate surface. Typical dispensers include a micropipette delivering solution to the substrate with a robotic system to control the position of the micropipette with respect to the substrate. There can be a multiplicity of dispensers so that reagents can be delivered to the reaction regions efficiently.

[0073] cDNAs can be immobilized on a substrate by covalent means such as by chemical bonding procedures or UV irradiation. In one method, a cDNA is bound to a glass surface which has been modified to contain epoxide or aldehyde groups. In another method, a cDNA is placed on a polylysine coated surface and UV cross-linked to it as described by Shalon et al. (WO95/35505). In yet another method, a cDNA is actively transported from a solution to a given position on a substrate by electrical means (Heller, supra). cDNAs do not have to be directly bound to the substrate, but rather can be bound to the substrate through a linker group. The linker groups are typically about 6 to 50 atoms long to provide exposure of the attached cDNA. Preferred linker groups include ethylene glycol oligomers, diamines, diacids and the like. Reactive groups on the substrate surface react with a terminal group of the linker to bind the linker to the substrate. The other terminus of the linker is then bound to the cDNA. Alternatively, polynucleotides, plasmids or cells can be arranged on a filter. In the latter case, cells are lysed, proteins and cellular components degraded, and the DNA is coupled to the filter by UV cross-linking.

[0074] The cDNAs may be used for a variety of purposes. For example, the combination of the invention may be used on an array. The array, in turn, can be used in high-throughput methods for detecting a related polynucleotide in a sample, screening a plurality of molecules or compounds to identify a ligand, diagnosing atherosclerosis, or inhibiting or inactivating a therapeutically relevant gene related to the cDNA.

[0075] When the cDNAs of the invention are employed on a microarray, the cDNAs are arranged in an ordered fashion so that each cDNA is present at a specified location. Because the cDNAs are at specified locations on the substrate, the hybridization patterns and intensities, which together create a unique expression profile, can be interpreted in terms of expression levels of particular genes and can be correlated with a particular metabolic process, condition, disorder, disease, stage of disease, or treatment.

[0076] Hybridization

[0077] The cDNAs or fragments or complements thereof may be used in various hybridization technologies. The cDNAs may be labeled using a variety of reporter molecules by either PCR, recombinant, or enzymatic techniques. For example, a commercially available vector containing the cDNA is transcribed in the presence of an appropriate polymerase, such as T7 or SP6 polymerase, and at least one labeled nucleotide. Commercial kits are available for labeling and cleanup of such cDNAs. Radioactive (Amersham Bisociences (APB), Piscataway N.J.), fluorescent (Qiagen-Operon, Alameda Calif.), and chemiluminescent labeling (Promega, Madison Wis.) are well known in the art.

[0078] A cDNA may represent the complete coding region of an mRNA or be designed or derived from unique regions of the mRNA or genomic molecule, an intron, a 3′ untranslated region, or from a conserved motif. The cDNA is at least 18 contiguous nucleotides in length and is usually single stranded. Such a cDNA may be used under hybridization conditions that allow binding only to an identical sequence, a naturally occurring molecule encoding the same protein, or an allelic variant. Discovery of related human and mammalian sequences may also be accomplished using a pool of degenerate cDNAs and appropriate hybridization conditions. Generally, a cDNA for use in Southern or northern hybridizations may be from about 400 to about 6000 nucleotides long. Such cDNAs have high binding specificity in solution-based or substrate-based hybridizations. An oligonucleotide, a fragment of the cDNA, may be used to detect a polynucleotide in a sample using PCR.

[0079] The stringency of hybridization is determined by G+C content of the cDNA, salt concentration, and temperature. In particular, stringency is increased by reducing the concentration of salt or raising the hybridization temperature. In solutions used for some membrane based hybridizations, addition of an organic solvent such as formamide allows the reaction to occur at a lower temperature. Hybridization may be performed with buffers, such as 5×saline sodium citrate (SSC) with 1% sodium dodecyl sulfate (SDS) at 60° C., that permit the formation of a hybridization complex between nucleic acid sequences that contain some mismatches. Subsequent washes are performed with buffers such as 0.2×SSC with 0.1% SDS at either 45° C. (medium stringency) or 65°-68° C. (high stringency). At high stringency, hybridization complexes will remain stable only where the nucleic acids are completely complementary. In some membrane-based hybridizations, preferably 35% or most preferably 50%, formamide may be added to the hybridization solution to reduce the temperature at which hybridization is performed. Background signals may be reduced by the use of detergents such as Sarkosyl or TRITON X-100 (Sigma-Aldrich, St. Louis Mo.) and a blocking agent such as denatured salmon sperm DNA. Selection of components and conditions for hybridization are well known to those skilled in the art and are reviewed in Ausubel et al. (1997, Short Protocols in Molecular Biology, John Wiley & Sons, New York N.Y., Units 2.8-2.11, 3.18-3.19 and 4-6-4.9).

[0080] Dot-blot, slot-blot, low density and high density arrays are prepared and analyzed using methods known in the art. cDNAs from about 18 consecutive nucleotides to about 5000 consecutive nucleotides in length are contemplated by the invention and used in array technologies. The preferred number of cDNAs on an array is at least about 100,000, a more preferred number is at least about 40,000, an even more preferred number is at least about 10,000, and a most preferred number is at least about 600 to about 800. The array may be used to monitor the expression level of large numbers of genes simultaneously and to identify genetic variants, mutations, and SNPs. Such information may be used to determine gene function; to understand the genetic basis of a disorder; to diagnose a disorder; and to develop and monitor the activities of therapeutic agents being used to control or cure a disorder. (See, e.g., U.S. Pat. No. 5,474,796; WO95/11995; WO95/35505; U.S. Pat. No. 5,605,662; and U.S. Pat. No. 5,958,342.)

[0081] Screening and Purification Assays

[0082] A cDNA may be used to screen a library or a plurality of molecules or compounds for a ligand which specifically binds the cDNA. Ligands may be DNA molecules, RNA molecules, peptide nucleic acid molecules, peptides, proteins such as transcription factors, promoters, enhancers, repressors, and other proteins that regulate replication, transcription, or translation of the polynucleotide in the biological system. The assay involves combining the cDNA or a fragment thereof with the molecules or compounds under conditions that allow specific binding and detecting the bound cDNA to identify at least one ligand that specifically binds the cDNA.

[0083] In one embodiment, the cDNA may be incubated with a library of isolated and purified molecules or compounds and binding activity determined by methods such as a gel-retardation assay (U.S. Pat. No. 6,010,849) or a reticulocyte lysate transcriptional assay. In another embodiment, the cDNA may be incubated with nuclear extracts from biopsied and/or cultured cells and tissues. Specific binding between the cDNA and a molecule or compound in the nuclear extract is initially determined by gel shift assay. Protein binding may be confirmed by raising antibodies against the protein and adding the antibodies to the gel-retardation assay where specific binding will cause a supershift in the assay.

[0084] In another embodiment, the cDNA may be used to purify a molecule or compound using affinity chromatography methods well known in the art. In one embodiment, the cDNA is chemically reacted with cyanogen bromide groups on a polymeric resin or gel. Then a sample is passed over and reacts with or binds to the cDNA. The molecule or compound which is bound to the cDNA may be released from the cDNA by increasing the salt concentration of the flow-through medium and collected.

[0085] The cDNA may be used to purify a ligand from a sample. A method for using a cDNA to purify a ligand would involve combining the cDNA or a fragment thereof with a sample under conditions to allow specific binding, recovering the bound cDNA, and using an appropriate agent to separate the cDNA from the purified ligand.

[0086] Protein Production and Uses

[0087] The full length cDNAs or fragment thereof may be used to produce purified proteins using recombinant DNA technologies described herein and taught in Ausubel (supra; Units 16.1-16.62). One of the advantages of producing proteins by these procedures is the ability to obtain highly-enriched sources of the proteins thereby simplifying purification procedures.

[0088] The proteins may contain amino acid substitutions, deletions or insertions made on the basis of similarity in polarity, charge, solubility, hydrophobicity, hydrophilicity, and/or the amphipathic nature of the residues involved. Such substitutions may be conservative in nature when the substituted residue has structural or chemical properties similar to the original residue (e.g., replacement of leucine with isoleucine or valine) or they may be nonconservative when the replacement residue is radically different (e.g., a glycine replaced by a tryptophan). Computer programs included in LASERGENE software (DNASTAR, Madison Wis.) and algorithms included in RasMol software (University of Massachusetts, Amherst Mass.) may be used to help determine which and how many amino acid residues in a particular portion of the protein may be substituted, inserted, or deleted without abolishing biological or immunological activity.

[0089] Expression of Encoded Proteins

[0090] Expression of a particular cDNA may be accomplished by cloning the cDNA into a vector and transforming this vector into a host cell. The cloning vector used for the construction of cDNA libraries in the LIFESEQ databases (Incyte Genomics, Palo Alto Calif.) may also be used for expression. Such vectors usually contain a promoter and a polylinker useful for cloning, priming, and transcription. An exemplary vector may also contain the promoter for β-galactosidase, an amino-terminal methionine and the subsequent seven amino acid residues of β-galactosidase. The vector may be transformed into competent E. coli cells. Induction of the isolated bacterial strain with isopropylthiogalactoside (IPTG) using standard methods will produce a fusion protein that contains an N terminal methionine, the first seven residues of β-galactosidase, about 15 residues of linker, and the protein encoded by the cDNA.

[0091] The cDNA may be shuttled into other vectors known to be useful for expression of protein in specific hosts. Oligonucleotides containing cloning sites and fragments of DNA sufficient to hybridize to stretches at both ends of the cDNA may be chemically synthesized by standard methods. These primers may then be used to amplify the desired fragments by PCR. The fragments may be digested with appropriate restriction enzymes under standard conditions and isolated using gel electrophoresis. Alternatively, similar fragments are produced by digestion of the cDNA with appropriate restriction enzymes and filled in with chemically synthesized oligonucleotides. Fragments of the coding sequence from more than one gene may be ligated together and expressed.

[0092] Signal sequences that dictate secretion of soluble proteins are particularly desirable as component parts of a recombinant sequence. For example, a chimeric protein may be expressed that includes one or more additional purification-facilitating domains. Such domains include, but are not limited to, metal-chelating domains that allow purification on immobilized metals, protein A domains that allow purification on immobilized immunoglobulin, and the domain utilized in the FLAGS extension/affinity purification system (Immunex, Seattle Wash.). The inclusion of a cleavable-linker sequence such as ENTEROKINASEMAX (Invitrogen, San Diego Calif.) between the protein and the purification domain may also be used to recover the protein.

[0093] Suitable host cells may include, but are not limited to, mammalian cells such as Chinese Hamster Ovary (CHO) and human 293 cells, insect cells such as Sf9 cells, plant cells such as Nicotiana tabacum, yeast cells such as Saccharomyces cerevisiae, and bacteria such as E. coli. For each of these cell systems, a useful vector may also include an origin of replication and one or two selectable markers to allow selection in bacteria as well as in a transformed eukaryotic host. Vectors for use in eukaryotic host cells may require the addition of 3′ poly(A) tail if the cDNA lacks poly(A).

[0094] Additionally, the vector may contain promoters or enhancers that increase gene expression. Many promoters are known and used in the art. Most promoters are host specific and exemplary promoters includes SV40 promoters for CHO cells; T7 promoters for bacterial hosts; viral promoters and enhancers for plant cells; and PGH promoters for yeast. Adenoviral vectors with the rous sarcoma virus enhancer or retroviral vectors with long terminal repeat promoters may be used to drive protein expression in mammalian cell lines. Once homogeneous cultures of recombinant cells are obtained, large quantities of secreted soluble protein may be recovered from the conditioned medium and analyzed using chromatographic methods well known in the art. An alternative method for the production of large amounts of secreted protein involves the transformation of mammalian embryos and the recovery of the recombinant protein from milk produced by transgenic cows, goats, sheep, and the like.

[0095] In addition to recombinant production, proteins or portions thereof may be produced manually, using solid-phase techniques (Stewart et al. (1969) Solid-Phase Peptide Synthesis, W H Freeman, San Francisco Calif.; Merrifield (1963) J Am Chem Soc 5:2149-2154), or using machines such as the 431A peptide synthesizer (Applied Biosystems (ABI), Foster City Calif.). Proteins produced by any of the above methods may be used as pharmaceutical compositions to treat disorders associated with null or inadequate expression of the genomic sequence.

[0096] Screening and Purification Assays

[0097] A protein or a portion thereof encoded by the cDNA may be used to screen a library or a plurality of molecules or compounds for a ligand with specific binding affinity or to purify a molecule or compound from a sample. The protein or portion thereof employed in such screening may be free in solution, affixed to an abiotic or biotic substrate, or located intracellularly. For example, viable or fixed prokaryotic host cells that are stably transformed with recombinant nucleic acids that have expressed and positioned a protein on their cell surface can be used in screening assays. The cells are screened against a library or a plurality of ligands and the specificity of binding or formation of complexes between the expressed protein and the ligand may be measured. The ligands may be agonists, antagonists, antibodies, DNA molecules, small molecule drugs, immunoglobulins, inhibitors, mimetics, peptide nucleic acids, peptides, pharmaceutical agents, proteins, RNA molecules, ribozymes or any other test molecule or compound that specifically binds the protein. An exemplary assay involves combining the mammalian protein or a portion thereof with the molecules or compounds under conditions that allow specific binding and detecting the bound protein to identify at least one ligand that specifically binds the protein.

[0098] This invention also contemplates the use of competitive drug screening assays in which neutralizing antibodies capable of binding the protein specifically compete with a test compound capable of binding to the protein or oligopeptide or fragment thereof. One method for high throughput screening using very small assay volumes and very small amounts of test compound is described in U.S. Pat. No. 5,876,946. Molecules or compounds identified by screening may be used in a model system to evaluate their toxicity, diagnostic, or therapeutic potential.

[0099] The protein may be used to purify a ligand from a sample. A method for using a protein to purify a ligand would involve combining the protein or a portion thereof with a sample under conditions to allow specific binding, recovering the bound protein, and using an appropriate chaotropic agent to separate the protein from the purified ligand.

[0100] Production of Antibodies

[0101] A protein encoded by a cDNA of the invention may be used to produce specific antibodies. Antibodies may be produced using an oligopeptide or a portion of the protein with inherent immunological activity. Methods for producing antibodies include: 1) injecting an animal, usually goats, rabbits, or mice, with the protein, or an amtigenic determinant or an oligopeptide thereof, to induce an immune response; 2) engineering hybridomas to produce monoclonal antibodies; 3) inducing in vivo production in the lymphocyte population; or 4) screening libraries of recombinant immunoglobulins. Recombinant immunoglobulins may be produced as taught in U.S. Pat. No. 4,816,567.

[0102] Antibodies produced using the proteins of the invention are useful for the diagnosis of prepathologic disorders as well as the diagnosis of chronic or acute diseases characterized by abnormalities in the expression, amount, or distribution of the protein. A variety of protocols for competitive binding or immunoradiometric assays using either polyclonal or monoclonal antibodies specific for proteins are well known in the art. Immunoassays typically involve the formation of complexes between a protein and its specific binding molecule or compound and the measurement of complex formation. Immunoassays may employ a two-site, monoclonal-based assay that utilizes monoclonal antibodies reactive to two noninterfering epitopes on a specific protein or a competitive binding assay (Pound (1998) Immunochemical Protocols, Humana Press, Totowa N.J.).

[0103] Immunoassay procedures may be used to quantify expression of the protein in cell cultures, in subjects with a particular disorder or in model animal systems under various conditions. Increased or decreased production of proteins as monitored by immunoassay may contribute to knowledge of the cellular activities associated with developmental pathways, engineered conditions or diseases, or treatment efficacy. The quantity of a given protein in a given tissue may be determined by performing immunoassays on freeze-thawed detergent extracts of biological samples and comparing the slope of the binding curves to binding curves generated by purified protein.

[0104] Antibody Arrays

[0105] In an alternative to yeast two hybrid system analysis of proteins, an antibody array can be used to study protein-protein interactions and phosphorylation. A variety of protein ligands are immobilized on a membrane using methods well known in the art. The array is incubated in the presence of cell lysate until protein:antibody complexes are formed. Proteins of interest are identified by exposing the membrane to an antibody specific to the protein of interest. In the alternative, a protein of interest is labeled with digoxigenin (DIG) and exposed to the membrane; then the membrane is exposed to anti-DIG antibody which reveals where the protein of interest forms a complex. The identity of the proteins with which the protein of interest interacts is determined by the position of the protein of interest on the membrane.

[0106] Antibody arrays can also be used for high-throughput screening of recombinant antibodies. Bacteria containing antibody genes are robotically-picked and gridded at high density (up to 18,342 different double-spotted clones) on a filter. Up to 15 antigens at a time are used to screen for clones to identify those that express binding antibody fragments. These antibody arrays can also be used to identify proteins which are differentially expressed in samples (de Wildt et al. (2000) Nat Biotechnol 18:989-94).

[0107] Labeling of Molecules for Assay

[0108] A wide variety of reporter molecules and conjugation techniques are known by those skilled in the art and may be used in various cDNA, polynucleotide, protein, peptide or antibody assays. Synthesis of labeled molecules may be achieved using commercial kits for incorporation of a labeled nucleotide such as ³²P-dCTP, Cy3-dCTP or Cy5-dCTP or amino acid such as ³⁵S-methionine. Polynucleotides, cDNAs, proteins, or antibodies may be directly labeled with a reporter molecule by chemical conjugation to amines, thiols and other groups present in the molecules using reagents such as BIODIPY or FITC (Molecular Probes, Eugene Oreg.).

[0109] The proteins and antibodies may be labeled for purposes of assay by joining them, either covalently or noncovalently, with a reporter molecule that provides for a detectable signal. A wide variety of labels and conjugation techniques are known and have been reported in the scientific and patent literature including, but not limited to U.S. Pat. Nos. 3,817,837; 3,850,752; 3,939,350; 3,996,345; 4,277,437; 4,275,149; and 4,366,241.

[0110] Diagnostics

[0111] The cDNAs, or fragments thereof, may be used to detect and quantify differential gene expression; absence, presence, or excess expression of mRNAs; or to monitor mRNA levels during therapeutic intervention. Disorders associated with altered expression include disorders of increased vascularization such as atherosclerosis, hemangioma, hemangioendothelioma, warts, pyogenic granulomas, Kaposi's sarcoma, scar keloids, allergic oedema, neoplasms, follicular cysts, endometriosis, peritoneal sclerosis, diabetic retinopathy, and obesity; disorders of insufficient vascularization such as ulcers; and disorders of abnormal remodeling such as psoriasis. These cDNAs can also be utilized as markers of treatment efficacy against the disorders noted above and other disorders, conditions, and diseases over a period ranging from several days to months. The diagnostic assay may use hybridization or amplification technology to compare gene expression in a biological sample from a patient to standard samples in order to detect altered gene expression. Qualitative or quantitative methods for this comparison are well known in the art.

[0112] For example, the cDNA may be labeled by standard methods and added to a biological sample from a patient under conditions for hybridization complex formation. After an incubation period, the sample is washed and the amount of label (or signal) associated with hybridization complexes is quantified and compared with a standard value. If the amount of label in the patient sample is significantly altered in comparison to the standard value, then the presence of the associated condition, disease or disorder is indicated.

[0113] In order to provide a basis for the diagnosis of a condition, disease or disorder associated with gene expression, a normal or standard expression profile is established. This may be accomplished by combining a biological sample taken from normal subjects, either animal or human, with a probe under conditions for hybridization or amplification. Standard hybridization may be quantified by comparing the values obtained using normal subjects with values from an experiment in which a known amount of a purified target sequence is used. Standard values obtained in this manner may be compared with values obtained from samples from patients who are symptomatic for a particular condition, disease, or disorder. Deviation from standard values toward those associated with a particular condition is used to diagnose that condition.

[0114] Such assays may also be used to evaluate the efficacy of a particular therapeutic treatment regimen in animal studies and in clinical trial or to monitor the treatment of an individual patient. Once the presence of a condition is established and a treatment protocol is initiated, diagnostic assays may be repeated on a regular basis to determine if the level of expression in the patient begins to approximate that which is observed in a normal subject. The results obtained from successive assays may be used to show the efficacy of treatment over a period ranging from several days to months.

[0115] Gene Expression Profiles

[0116] A gene expression profile comprises a plurality of cDNAs and a plurality of detectable hybridization complexes, wherein each complex is formed by hybridization of one or more probes to one or more complementary nucleic acids in a sample. The cDNAs of the invention are used as elements on a array to analyze gene expression profiles. In one embodiment, the array is used to monitor the progression of disease. Researchers and clinicians can catalog the differences in gene expression between healthy and diseased tissues or cells. By analyzing changes in patterns of gene expression, disease can be diagnosed at earlier stages before the patient is symptomatic. The invention can be used to formulate a prognosis and to design a treatment regimen. The invention can also be used to monitor the efficacy of treatment. For treatments with known side effects, the array is employed to improve the treatment regimen. A dosage is established that causes a change in genetic expression patterns indicative of successful treatment. Expression patterns associated with the onset of undesirable side effects are avoided. This approach may be more sensitive and rapid than waiting for the patient to show inadequate improvement, or to manifest side effects, before altering the course of treatment.

[0117] Experimentally, expression profiles can also be evaluated by methods including, but not limited to, differential display by spatial immobilization or by gel electrophoresis, genome mismatch scanning, representational discriminant analysis, transcript imaging, and by protein or antibody arrays. Expression profiles produced by these methods may be used alone or in combination. The correspondence between mRNA and protein expression has been discussed by Zweiger (2001, Transducing the Genome. McGraw-Hill, San Francisco, Calif.) and Glavas et al. (2001; T cell activation upregulates cyclic nucleotide phosphodiesterases 8A1 and 7A3, Proc Natl Acad Sci 98:6319-6342) among others.

[0118] In another embodiment, animal models which mimic a human disease can be used to characterize expression profiles associated with a particular condition, disorder or disease; or treatment of the condition, disorder or disease. Novel treatment regimens may be tested in these animal models using arrays to establish and then follow expression profiles over time. In addition, arrays may be used with cell cultures or tissues removed from animal models to rapidly screen large numbers of candidate drug molecules, looking for ones that produce an expression profile similar to those of known therapeutic drugs, with the expectation that molecules with the same expression profile will likely have similar therapeutic effects. Thus, the invention provides the means to rapidly determine the molecular mode of action of a drug.

[0119] Assays Using Antibodies

[0120] Antibodies directed against epitopes on a protein encoded by a cDNA of the invention may be used in assays to quantify the amount of protein found in a particular human cell. Such assays include methods utilizing the antibody and a label to detect expression level under normal or disease conditions.

[0121] The antibodies may be used with or without modification, and labeled by joining them, either covalently or noncovalently, with a labeling moiety.

[0122] Protocols for detecting and measuring protein expression using either polyclonal or monoclonal antibodies are well known in the art. Examples include ELISA, RIA, fluorescent activated cell sorting (FACS) and arrays. Such immunoassays typically involve the formation of complexes between the protein and its specific antibody and the measurement of such complexes. These and other assays are described in Pound (supra).

[0123] Therapeutics

[0124] The cDNAs and fragments thereof can be used in gene therapy. cDNAs can be delivered ex vivo to target cells, such as cells of bone marrow. Once stable integration and transcription and or translation are confirmed, the bone marrow may be reintroduced into the subject. Expression of the protein encoded by the cDNA may correct a disorder associated with mutation of a normal sequence, reduction or loss of an endogenous target protein, or overepression of an endogenous or mutant protein. Alternatively, cDNAs may be delivered in vivo using vectors such as retrovirus, adenovirus, adeno-associated virus, herpes simplex virus, and bacterial plasmids. Non-viral methods of gene delivery include cationic liposomes, polylysine conjugates, artificial viral envelopes, and direct injection of DNA (Anderson (1998) Nature 392:25-30; Dachs et al. (1997) Oncol Res 9:313-325; Chu et al. (1998) J Mol Med 76(3-4):184-192; Weiss et al. (1999) Cell Mol Life Sci 55(3):334-358; Agrawal (1996) Antisense Therapeutics, Humana Press, Totowa N.J.; and August et al. (1997) Gene Therapy (Advances in Pharmacolo, Vol. 40), Academic Press, San Diego Calif.).

[0125] In addition, expression of a particular protein can be regulated through the specific binding of a fragment of a cDNA to a genomic sequence or an mRNA which encodes the protein or directs its transcription or translation. The cDNA can be modified or derivatized to any RNA-like or DNA-like 5 material including peptide nucleic acids, branched nucleic acids, and the like. These sequences can be produced biologically by transforming an appropriate host cell with a vector containing the sequence of interest.

[0126] Molecules which regulate the activity of the cDNA or encoded protein are useful as therapeutics for vascular disorders such as atherosclerosis, diabetic retinopathy, neoplasms, and obesity. Such molecules include agonists which increase the expression or activity of the polynucleotide or encoded protein, respectively; or antagonists which decrease expression or activity of the polynucleotide or encoded protein, respectively. In one aspect, an antibody which specifically binds the protein may be used directly as an antagonist or indirectly as a delivery mechanism for bringing a pharmaceutical agent to cells or tissues which express the protein. Additionally, any of the proteins, or their ligands, or complementary nucleic acid sequences may be administered as pharmaceutical compositions or in combination with other appropriate therapeutic agents. Selection of the appropriate agents for use in combination therapy may be made by one of ordinary skill in the art, according to conventional pharmaceutical principles. The combination of therapeutic agents may act synergistically to affect the treatment or prevention of the conditions and disorders associated with an immune response. Using this approach, one may be able to achieve therapeutic efficacy with lower dosages of each agent, thus reducing the potential for adverse side effects. Further, the therapeutic agents may be combined with pharmaceutically-acceptable carriers including excipients and auxiliaries which facilitate processing of the active compounds into preparations which can be used pharmaceutically. Further details on techniques for formulation and administration used by doctors and pharmacists may be found in the latest edition of Remington's Pharmaceutical Sciences (Mack Publishing, Easton Pa.).

[0127] Model Systems

[0128] Animal models may be used as bioassays where they exhibit a phenotypic response similar to that of humans and where exposure conditions are relevant to human exposures. Mammals are the most common models, and most infectious agent, cancer, drug, and toxicity studies are performed on rodents such as rats or mice because of low cost, availability, lifespan, reproductive potential, and abundant reference literature. Inbred and outbred rodent strains provide a convenient model for investigation of the physiological consequences of underexpression or overexpression of genes of interest and for the development of methods for diagnosis and treatment of diseases. A mammal inbred to overexpress a particular gene (for example, secreted in milk) may also serve as a convenient source of the protein expressed by that gene.

[0129] Transgenic Animal Models

[0130] Transgenic rodents that overexpress or underexpress a gene of interest may be inbred and used to model human diseases or to test therapeutic or toxic agents. (See, e.g., U.S. Pat. No. 5,175,383 and U.S. Pat. No. 5,767,337.) In some cases, the introduced gene may be activated at a specific time in a specific tissue type during fetal or postnatal development. Expression of the transgene is monitored by analysis of phenotype, of tissue-specific mRNA expression, or of serum and tissue protein levels in transgenic animals before, during, and after challenge with experimental drug therapies.

[0131] Embryonic Stem Cells

[0132] Embryonic (ES) stem cells isolated from rodent embryos retain the potential to form embryonic tissues. When ES cells such as the mouse 129/SvJ cell line are placed in a blastocyst from the C57BL/6 mouse strain, they resume normal development and contribute to tissues of the live-born animal. ES cells are preferred for use in the creation of experimental knockout and knockin animals. The method for this process is well known in the art and the steps are: the cDNA is introduced into a vector, the vector is transformed into ES cells, transformed cells are identified and microinjected into mouse cell blastocysts, blastocysts are surgically transferred to pseudopregnant dams. The resulting chimeric progeny are genotyped and bred to produce heterozygous or homozygous strains.

[0133] Knockout Analysis

[0134] In gene knockout analysis, a region of a gene is enzymatically modified to include a non-natural intervening sequence such as the neomycin phosphotransferase gene (neo; Capecchi (1989) Science 244:1288-1292). The modified gene is transformed into cultured ES cells and integrates into the endogenous genome by homologous recombination. The inserted sequence disrupts transcription and translation of the endogenous gene.

[0135] Knockin Analysis

[0136] ES cells can be used to create knockin humanized animals or transgenic animal models of human diseases. With knockin technology, a region of a human gene is injected into animal ES cells, and the human sequence integrates into the animal cell genome. Transgenic progeny or inbred lines are studied and treated with potential pharmaceutical agents to obtain information on the progression and treatment of the analogous human condition.

[0137] As described herein, the uses of the cDNAs, provided in the Sequence Listing of this application, and their encoded proteins are exemplary of known techniques and are not intended to reflect any limitation on their use in any technique that would be known to the person of average skill in the art.

[0138] Furthermore, the cDNAs provided in this application may be used in molecular biology techniques that have not yet been developed, provided the new techniques rely on properties of nucleotide sequences that are currently known to the person of ordinary skill in the art, e.g., the triplet genetic code, specific base pair interactions, and the like. Likewise, reference to a method may include combining more than one method for obtaining or assembling full length cDNA sequences that will be known to those skilled in the art. It is also to be understood that this invention is not limited to the particular methodology, protocols, and reagents described, as these may vary. It is also understood that the terminology used herein is for the purpose of describing particular embodiments only, and is not intended to limit the scope of the present invention which will be limited only by the appended claims. The examples below are provided to illustrate the subject invention and are not included for the purpose of limiting the invention.

### EXAMPLES

[0139] I Construction of cDNA Libraries

[0140] RNA was purchased from Clontech Laboratories (Palo Alto Calif.) or isolated from various tissues. Some tissues were homogenized and lysed in guanidinium isothiocyanate, while others were homogenized and lysed in phenol or in a suitable mixture of denaturants, such as TRIZOL reagent (Invitrogen). The resulting lysates were centrifuged over CsCl cushions or extracted with chloroform. RNA was precipitated with either isopropanol or ethanol and sodium acetate, or by other routine methods.

[0141] Phenol extraction and precipitation of RNA were repeated as necessary to increase RNA purity. In most cases, RNA was treated with DNAse. For most libraries, poly(A) RNA was isolated using oligo d(T)-coupled paramagnetic particles (Promega), OLIGOTEX latex particles (Qiagen, Valencia Calif.), or an OLIGOTEX mRNA purification kit (Qiagen). Alternatively, poly(A) RNA was isolated directly from tissue lysates using other kits, including the POLY(A)PURE mRNA purification kit (Ambion, Austin Tex.).

[0142] In some cases, Stratagene (La Jolla Calif.) was provided with RNA and constructed the corresponding cDNA libraries. Otherwise, cDNA was synthesized and cDNA libraries were constructed with the UNIZAP vector system (Stratagene) or SUPERSCRIPT plasmid system (Invitrogen) using the recommended procedures or similar methods known in the art. (See Ausubel, supra, Units 5.1 through 6.6.) Reverse transcription was initiated using oligo d(T) or random primers. Synthetic oligonucleotide adapters were ligated to double stranded cDNA, and the cDNA was digested with the appropriate restriction enzyme or enzymes. For most libraries, the cDNA was size-selected (300-1000 bp) using SEPHACRYL S1000, SEPHAROSE CL2B, or SEPHAROSE CL4B column chromatography (APB) or preparative agarose gel electrophoresis. cDNAs were ligated into compatible restriction enzyme sites of the polylinker of the pBLUESCRIPT phagemid (Stratagene), pSPORT1 plasmid (Invitrogen), or pINCY plasmid (Incyte Genomics). Recombinant plasmids were transformed into XL1-BLUE, XL1-BLUEMRF, or SOLR competent E. coli cells (Stratagene) or DH5a, DH10B, or ELECTROMAX DH10B competent E. coli cells (Invitrogen).

[0143] In some cases, libraries were superinfected with a 5×excess of the helper phage, M13K07, according to the method of Vieira et al. (1987, Methods Enzymol 153:3-11) and normalized or subtracted using a methodology adapted from Soares (1994, Proc Natl Acad Sci 91:9228-9232), Swaroop et al. (1991, Nucleic Acids Res 19:1954), and Bonaldo et al. (1996, Genome Res 6:791-806). The modified Soares normalization procedure was utilized to reduce the repetitive cloning of highly expressed high abundance cDNAs while maintaining the overall sequence complexity of the library. Modification included significantly longer hybridization times which allowed for increased gene discovery rates by biasing the normalized libraries toward those infrequently expressed low-abundance cDNAs which are poorly represented in a standard transcript image (Soares, supra).

[0144] II Isolation and Sequencing of cDNA Clones

[0145] Plasmids were recovered from host cells by in vivo excision using the UNIZAP vector system (Stratagene) or by cell lysis. Plasmids were purified using one of the following: the Magic or WIZARD MINIPREPS DNA purification system (Promega); the AGTC MINIPREP purification kit (Edge BioSystems, Gaithersburg Md.); the QIAWELL 8, QIAWELL 8 Plus, or QIAWELL 8 Ultra plasmid purification systems, or the REAL PREP 96 plasmid purification kit (Qiagen). Following precipitation, plasmids were resuspended in 0.1 ml of distilled water and stored, with or without lyophilization, at 4° C.

[0146] Alternatively, plasmid DNA was amplified from host cell lysates using direct link PCR in a high-throughput format (Rao (1994) Anal Biochem 216:1-14). Host cell lysis and thermal cycling steps were carried out in a single reaction mixture. Samples were processed and stored in 384-well plates, and the concentration of amplified plasmid DNA was quantified fluorometrically using PICOGREEN dye (Molecular Probes) and a FLUOROSKAN II fluorescence scanner (Labsystems Oy, Helsinki, Finland).

[0147] cDNA sequencing reactions were processed using standard methods or high-throughput instrumentation such as the CATALYST 800 thermal cycler (ABI) or the DNA ENGINE thermal cycler (MJ Research, Watertown Mass.) in conjunction with the HYDRA microdispenser (Robbins Scientific, Sunnyvale Calif.) or the MICROLAB 2200 system (Hamilton, Reno Nev.). cDNA sequencing reactions were prepared using reagents provided by APB or supplied in sequencing kits such as the PRISM BIGDYE cycle sequencing kit (ABI). Electrophoretic separation of cDNA sequencing reactions and detection of labeled cDNAs were carried out using the MEGABACE 1000 DNA sequencing system (APB); the PRISM 373 or 377 sequencing systems (ABI) in conjunction with standard protocols and base calling software; or other sequence analysis systems known in the art. Reading frames within the cDNA sequences were identified using standard methods (reviewed in Ausubel, supra, Unit 7.7).

[0148] III Extension of cDNA Sequences

[0149] Nucleic acid sequences were extended using the cDNA clones and oligonucleotide primers. One primer was synthesized to initiate 5′ extension of the known fragment, and the other, to initiate 3′ extension of the known fragment. The initial primers were designed using OLIGO primer analysis software (Molecular Biology Insights, Cascade Colo.), or another appropriate program, to be about 22 to 30 nucleotides in length, to have a GC content of about 50% or more, and to anneal to the target sequence at temperatures of about 68° C. to about 72° C. Any stretch of nucleotides which would result in hairpin structures and primer-primer dimerizations was avoided.

[0150] Selected human cDNA libraries were used to extend the sequence. If more than one extension was necessary or desired, additional or nested sets of primers were designed. Preferred libraries are ones that have been size-selected to include larger cDNAs. Also, random primed libraries are preferred because they will contain more sequences with the 5′ and upstream regions of genes. A randomly primed library is particularly useful if an oligo d(T) library does not yield a full-length cDNA.

[0151] High fidelity amplification was obtained by PCR using methods well known in the art. PCR was performed in 96-well plates using the DNA ENGINE thermal cycler (MJ Research). The reaction mix contained DNA template, 200 mmol of each primer, reaction buffer containing Mg²⁺, (NH₄)₂SO₄, and β-mercaptoethanol, Taq DNA polymerase (APB), ELONGASE enzyme (Invitrogen), and Pfu DNA polymerase (Stratagene), with the following parameters for primer pair PCI A and PCI B (Incyte Genomics): Step 1: 94° C., 3 min; Step 2: 94° C., 15 sec; Step 3: 60° C., 1 min; Step 4: 68° C., 2 min; Step 5: Steps 2, 3, and 4 repeated 20 times; Step 6: 68° C., 5 min; Step 7: storage at 4° C. In the alternative, the parameters for primer pair T7 and SK+ (Stratagene) were as follows: Step 1: 94° C., 3 min; Step 2: 94° C., 15 sec; Step 3: 57° C., 1 min; Step 4: 68° C., 2 min; Step 5: Steps 2, 3, and 4 repeated 20 times; Step 6: 68° C., 5 min; Step 7: storage at 4° C.

[0152] The concentration of DNA in each well was determined by dispensing 100 μl PICOGREEN reagent (0.25% reagent in 1×TE, v/v; Molecular Probes) and 0.5 μl of undiluted PCR product into each well of an opaque fluorimeter plate (Corning Costar, Acton Mass.) and allowing the DNA to bind to the reagent. The plate was scanned in a FLUOROSKAN II (Labsystems Oy) to measure the fluorescence of the sample and to quantify the concentration of DNA. A 5 μl to 10 μl aliquot of the reaction mixture was analyzed by electrophoresis on a 1% agarose mini-gel to determine which reactions were successful in extending the sequence.

[0153] The extended nucleic acids were desalted and concentrated, transferred to 384-well plates, digested with CviJI cholera virus endonuclease (Molecular Biology Research, Madison Wis.), and sonicated or sheared prior to religation into pUC18 vector (APB). For shotgun sequencing, the digested nucleic acids were separated on low concentration (0.6 to 0.8%) agarose gels, fragments were excised, and agar digested with AGARACE enzyme (Promega). Extended clones were religated using T4 DNA ligase (New England Biolabs, Beverly Mass.) into pUC18 vector (APB), treated with Pfu DNA polymerase (Stratagene) to fill-in restriction site overhangs, and transformed into competent E. coli cells. Transformed cells were selected on antibiotic-containing media, and individual colonies were picked and cultured overnight at 37° C. in 384-well plates in LB/2×carbenicillin liquid media.

[0154] The cells were lysed, and DNA was amplified by PCR using Taq DNA polymerase (APB) and Pfu DNA polymerase (Stratagene) with the following parameters: Step 1: 94° C., 3 min; Step 2: 94° C., 15 sec; Step 3: 60° C., 1 min; Step 4: 72° C., 2 min; Step 5: steps 2, 3, and 4 repeated 29 times; Step 6: 72° C., 5 min; Step 7: storage at 4° C. DNA was quantified using PICOGREEN reagent (Molecular Probes) as described above. Samples with low DNA recoveries were reamplified using the same conditions described above. Samples were diluted with 20% dimethylsulfoxide (DMSO; 1:2, v/v), and sequenced using DYENAMIC energy transfer sequencing primers and the DYENAMIC DIRECT cycle sequencing kit (APB) or the PRISM BIGDYE terminator cycle sequencing kit (ABI).

[0155] IV Assembly and Analysis of Sequences

[0156] The nucleic acid sequences of the cDNAs presented in the Sequence Listing may contain occasional sequencing errors and unidentified nucleotides (N) that reflect state-of-the-art technology at the time the cDNA was sequenced. Occasional sequencing errors and Ns may be resolved and SNPs verified either by resequencing the cDNA or using algorithms to compare multiple sequences; these techniques are well known to those skilled in the art who wish to practice the invention. The sequences may be analyzed using a variety of algorithms described in Ausubel (supra, unit 7.7) and in Meyers (1995; Molecular Biology and Biotechnology, Wiley VCH, New York N.Y., pp. 856-853).

[0157] Component nucleotide sequences from chromatograms were subjected to PHRED analysis (Phil Green, University of Washington, Seattle Wash.) and assigned a quality score. The sequences having at least a required quality score were subject to various pre-processing algorithms to eliminate low quality 3′ ends, vector and linker sequences, polyA tails, Alu repeats, mitochondrial and ribosomal sequences, bacterial contamination sequences, and sequences smaller than 50 base pairs. Sequences were screened using the BLOCK 2 program (Incyte Genomics), a motif analysis program based on sequence information contained in the SWISS-PROT and PROSITE databases (Bairoch et al. (1997) Nucleic Acids Res 25:217-221; Attwood et al. (1997) J Chem Inf Comput Sci 37:417-424).

[0158] Processed sequences were subjected to assembly procedures in which the sequences were assigned to bins, one sequence per bin. Sequences in each bin were assembled to produce consensus sequences, templates. Subsequent new sequences were added to existing bins using BLAST (Altschul (1990, supra); Altschul (1993, supra); Karlin et al. (1988) Proc Natl Acad Sci 85:841-845), BLASTn (vers.1.4, WashU), and CROSSMATCH software (Green, supra). Candidate pairs were identified as all BLAST hits having a quality score greater than or equal to 150. Alignments of at least 82% local identity were accepted into the bin. The component sequences from each bin were assembled using PHRAP (Green, supra). Bins with several overlapping component sequences were assembled using DEEP PHRAP (Green, supra).

[0159] Bins were compared against each other, and those having local similarity of at least 82% were combined and reassembled. Reassembled bins having templates of insufficient overlap (less than 95% local identity) were re-split. Assembled templates were also subjected to analysis by STITCHER/EXON MAPPER algorithms which analyzed the probabilities of the presence of splice variants, alternatively spliced exons, splice junctions, differential expression of alternative spliced genes across tissue types, disease states, and the like. These resulting bins were subjected to several rounds of the above assembly procedures to generate the template sequences found in the LIFESEQ GOLD database (Incyte Genomics).

[0160] The assembled templates were annotated using the following procedure. Template sequences were analyzed using BLASTn (vers. 2.0, NCBI) versus GBpri (GenBank vers. 116). “Hits” were defined as an exact match having from 95% local identity over 200 base pairs through 100% local identity over 100 base pairs, or a homolog match having an E-value equal to or greater than 1×10⁻⁸. (The “E-value” quantifies the statistical probability that a match between two sequences occurred by chance). The hits were subjected to frameshift FASTx versus GENPEPT (GenBank version 109). In this analysis, a homolog match was defined as having an E-value of 1×10⁻⁸. The assembly method used above was described in U.S. Ser. No. 09/276,534, filed Mar. 25, 1999, and the LIFESEQ GOLD user manual (Incyte Genomics).

[0161] Following assembly, template sequences were subjected to motif, BLAST, Hidden Markov Model (HMM; Pearson and Lipman (1988) Proc Natl Acad Sci 85:2444-2448; Smith and Waterman, supra), and functional analyses, and categorized in protein hierarchies using methods described in U.S. Ser. No. 08/812,290, filed Mar. 6, 1997; U.S. Ser. No. 08/947,845, filed Oct. 9, 1997; U.S. Pat. No. 5,953,727; and U.S. Ser. No. 09/034,807, filed Mar. 4, 1998. Template sequences may be further queried against public databases such as the GenBank rodent, mammalian, vertebrate, eukaryote, prokaryote, and human EST databases.

[0162] V Selection of Sequences, Microarray Preparation and Use

[0163] Incyte clones represent template sequences derived from the LIFESEQ GOLD assembled human sequence database (Incyte Genomics). In cases where more than one clone was available for a particular template, the 5′-most clone in the template was used on the microarray. The HUMAN GENOME GEM series 1-5 microarrays (Incyte Genomics) contain 45,320 array elements which represent 22,632 annotated clusters and 22,688 unannotated clusters. For the UNIGEM series microarrays (Incyte Genomics), Incyte clones were mapped to non-redundant Unigene clusters (Unigene database (build 46), NCBI; Shuler (1997) J Mol Med 75:694-698), and the 5′ clone with the strongest BLAST alignment (at least 90% identity and 100 bp overlap) was chosen, verified, and used in the construction of the microarray. The UNIGEM V 2.0 microarray (Incyte Genomics) contains 8,502 array elements which represent 8,372 annotated genes and 130 unannotated clusters. Table 5 shows the GenBank annotations (where available) for SEQ ID NOs:1-292 of this invention as produced by BLAST analysis.

[0164] To construct microarrays, cDNAs were amplified from bacterial cells using primers complementary to vector sequences flanking the cDNA insert. Thirty cycles of PCR increased the initial quantity of cDNAs from 1-2 ng to a final quantity greater than 5 μg. Amplified cDNAs were then purified using SEPHACRYL-400 columns (APB). Purified cDNAs were immobilized on polymer-coated glass slides. Glass microscope slides (Corning, Corning N.Y.) were cleaned by ultrasound in 0.1% SDS and acetone, with extensive distilled water washes between and after treatments. Glass slides were etched in 4% hydrofluoric acid (VWR Scientific Products, West Chester Pa.), washed thoroughly in distilled water, and coated with 0.05% aminopropyl silane (Sigma-Aldrich) in 95% ethanol. Coated slides were cured in a 110° C. oven. cDNAs were applied to the coated glass substrate using a procedure described in U.S. Pat. No. 5,807,522. One microliter of the cDNA at an average concentration of 100 ng/ul was loaded into the open capillary printing element by a high-speed robotic apparatus which then deposited about 5 nl of cDNA per slide.

[0165] Microarrays were UV-crosslinked using a STRATALINKER UV-crosslinker (Stratagene), and then washed at room temperature once in 0.2% SDS and three times in distilled water. Non-specific binding sites were blocked by incubation of microarrays in 0.2% casein in phosphate buffered saline (Tropix, Bedford Mass.) for 30 minutes at 60° C. followed by washes in 0.2% SDS and distilled water as before.

[0166] VI Preparation of Samples

[0167] Human coronary artery endothelial cells (HCAEC), human iliac artery endothelial cells (HIAEC), human pulmonary artery endothelial cells (HPAEC), human aortic endothelial cells (HAEC), human umbilical artery endothelial cells (HUAEC), human uterine myometium microvasculature (UtMVEC), human dermal microvasculature (HMVECD), and human umbilical vein endothelial cells (HUVEC) were obtained from Clonetics Corporation (San Diego, Calif.). Cells were grown in EGM-2 medium at 37° C., 5% CO₂ using procedures supplied by Clonetics. All cells were grown to approximately 85% confluency and harvested without treatment.

[0168] Isolation and Labeling of Sample cDNAs

[0169] Cells were harvested and lysed in 1 ml of TRIZOL reagent (5×10⁶ cells/ml; Invitrogen). The lysates were vortexed thoroughly and incubated at room temperature for 2-3 minutes and extracted with 0.5 ml chloroform. The extract was mixed, incubated at room temperature for 5 minutes, and centrifuged at 16,000×g for 15 minutes at 4° C. The aqueous layer was collected, and an equal volume of isopropanol was added. Samples were mixed, incubated at room temperature for 10 minutes, and centrifuged at 16,000×g for 20 minutes at 4° C. The supernatant was removed, and the RNA pellet was washed with 1 ml of 70% ethanol, centrifuged at 16,000×g at 4° C., and resuspended in RNAse-free water. The concentration of the RNA was determined by measuring the optical density at 260 nm. Poly(A) RNA was prepared using an OLIGOTEX mRNA kit (Qiagen) with the following modifications: OLIGOTEX beads were washed in tubes instead of on spin columns, resuspended in elution buffer, and then loaded onto spin columns to recover mRNA. To obtain maximum yield, the mRNA was eluted twice. The pooled control was prepared using an equal amount of mRNA from HCAEC, HUAEC, UtMVEC, HIAEC, HMVECD, and HUVEC.

[0170] Each poly(A) RNA sample was reverse transcribed using MMLV reverse-transcriptase, 0.05 pg/μl oligo-d(T) primer (21mer), 1×first strand buffer, 0.03 units/ul RNAse inhibitor, 500 uM dATP, 500 uM dGTP, 500 uM dTTP, 40 uM dCTP, and 40 uM either dCTP-Cy3 or dCTP-Cy5 (APB). The reverse transcription reaction was performed in a 25 ml volume containing 200 ng poly(A) RNA using the GEMBRIGHT kit (Incyte Genomics). Specific control poly(A) RNAs (YCFRO6, YCFR45, YCFR67, YCFR85, YCFR43, YCFR22, YCFR23, YCFR25, YCFR44, YCFR26) were synthesized by in vitro transcription from non-coding yeast genomic DNA (W. Lei, unpublished). As quantitative controls, control mRNAs (YCFRO6, YCFR45, YCFR67, and YCFR85) at 0.002 ng, 0.02 ng, 0.2 ng, and 2 ng were diluted into reverse transcription reaction at ratios of 1:100,000,1:10,000, 1:1000, 1:100 (w/w) to sample mRNA, respectively. To sample differential expression patterns, control rmRNAs (YCFR43, YCFR22, YCFR23, YCFR25, YCFR44, YCFR26) were diluted into reverse transcription reaction at ratios of 1:3, 3:1, 1:10, 10:1, 1:25, 25:1 (w/w) to sample mRNA. Reactions were incubated at 37° C. for 2 hr, treated with 2.5 ml of 0.5M sodium hydroxide, and incubated for 20 minutes at 85° C. to the stop the reaction and degrade the RNA. cDNAs were purified using two successive CHROMA SPIN 30 gel filtration spin columns (Clontech). Cy3- and CyS-labeled reaction samples were combined as described below and ethanol precipitated using 1 ml of glycogen (1 mg/ml), 60 ml sodium acetate, and 300 ml of 100% ethanol. The cDNAs were then dried to completion using a SpeedVAC system (Savant Instruments, Holbrook N.Y.) and resuspended in 14 μl 5×SSC, 0.2% SDS.

[0171] VII Hybridization and Detection

[0172] Hybridization reactions contained 9 μl of sample mixture containing 0.2 μg each of Cy3-labeled pooled control and Cy5 labeled source-specific vascular endothelium cDNA synthesis products in 5×SSC, 0.2% SDS hybridization buffer. The mixture was heated to 65° C. for 5 minutes and was aliquoted onto the microarray surface and covered with an 1.8 cm² coverslip. The microarrays were transferred to a waterproof chamber having a cavity just slightly larger than a microscope slide. The chamber was kept at 100% humidity internally by the addition of 140 μl of 5×SSC in a corner of the chamber. The chamber containing the microarrays was incubated for about 6.5 hours at 60° C. The microarrays were washed for 10 min at 45° C. in low stringency wash buffer (1×SSC, 0.1% SDS), three times for 10 minutes each at 45° C. in high stringency wash buffer (0.1×SSC), and dried.

[0173] Reporter-labeled hybridization complexes were detected with a microscope equipped with an Innova 70 mixed gas 10 W laser (Coherent, Santa Clara Calif.) capable of generating spectral lines at 488 nm for excitation of Cy3 and at 632 nm for excitation of CyS. The excitation laser light was focused on the microarray using a 20×microscope objective (Nikon, Melville N.Y.). The slide containing the microarray was placed on a computer-controlled X-Y stage on the microscope and raster-scanned past the objective. The 1.8 cm×1.8 cm microarray used in the present example was scanned with a resolution of 20 micrometers.

[0174] In two separate scans, the mixed gas multiline laser excited the two fluorophores sequentially. Emitted light was split, based on wavelength, into two photomultiplier tube detectors (PMT R1477; Hamamatsu Photonics Systems, Bridgewater N.J.) corresponding to the two fluorophores. Appropriate filters positioned between the microarray and the photomultiplier tubes were used to filter the signals. The emission maxima of the fluorophores used were 565 nm for Cy3 and 650 nm for Cy5. Each microarray was typically scanned twice, one scan per fluorophore using the appropriate filters at the laser source, although the apparatus was capable of recording the spectra from both fluorophores simultaneously.

[0175] The sensitivity of the scans was calibrated using the signal intensity generated by a cDNA control species. Samples of the calibrating cDNA were separately labeled with the two fluorophores and identical amounts of each were added to the hybridization mixture. A specific location on the microarray contained a complementary DNA sequence, allowing the intensity of the signal at that location to be correlated with a weight ratio of hybridizing species of 1:100,000.

[0176] The output of the photomultiplier tube was digitized using a 12-bit RTI-835H analog-to-digital (A/D) conversion board (Analog Devices, Norwood, Mass.) installed in an IBM-compatible PC computer. The digitized data were displayed as an image where the signal intensity was mapped using a linear 20-color transformation to a pseudocolor scale ranging from blue (low signal) to red (high signal). The data was also analyzed quantitatively. Where two different fluorophores were excited and measured simultaneously, the data were first corrected for optical crosstalk (due to overlapping emission spectra) between the fluorophores using each fluorophore's emission spectrum.

[0177] A grid was superimposed over the fluorescence signal image such that the signal from each spot was centered in each element of the grid. The fluorescence signal within each element was then integrated to obtain a numerical value corresponding to the average intensity of the signal. The software used for signal analysis was the GEMTOOLS gene expression analysis program (Incyte Genomics). Significance was defined as signal to background ratio exceeding 2× and area hybridization exceeding 40%.

[0178] VIII Data Analysis and Results

[0179] Array elements that exhibited at least 1.5-fold change in expression in one or more vascular endothelial sample, a signal intensity over 250 units, a signal-to-background ratio of at least 2.5, and an element spot size of at least 40% were identified as differentially expressed using the GEMTOOLS program (Incyte Genomics). Differential expression values were converted to log base 2 scale; negative values indicate higher expression in the specific endothelial sample relative to the pooled control. Expression in large arteries (HCAEC, HIAEC, HPAEC, HAEC) was compared with expression in microvasculature (UtMVEC, HMVECD). The clones representing cDNAs that are expressed at higher levels in microvasculature are shown in Tables 1 and 2. The clones representing cDNAs that are expressed at higher levels in large artery endothelium are shown in Table 3.

[0180] IX Further Characterization of Differentially Expressed cDNAs and Proteins

[0181] Clones were blasted against the LIFESEQ Gold 5.1 database (Incyte Genomics) and an Incyte template and its sequence variants were chosen for each clone. Table 4 provides a map between the clones present on microarrays and identified in Tables 1, 2, and 3, and the cDNAs identified in the Sequence Listing. The template and variant sequences were blasted against GenBank database to acquire annotation. The nucleotide sequences were translated into amino acid sequence which was blasted against the GenPept and other protein databases to acquire annotation and characterization, i.e., structural motifs. Table 5 shows the annotations provided by BLAST analysis for each cDNA of the present invention.

[0182] Percent sequence identity can be determined electronically for two or more amino acid or nucleic acid sequences using the MEGALIGN program, a component of LASERGENE software (DNASTAR). The percent identity between two amino acid sequences is calculated by dividing the length of sequence A, minus the number of gap residues in sequence A, minus the number of gap residues in sequence B, into the sum of the residue matches between sequence A and sequence B, times one hundred. Gaps of low or of no homology between the two amino acid sequences are not included in determining percentage identity.

[0183] Sequences with conserved protein motifs may be searched using the BLOCKS search program. This program analyses sequence information contained in the Swiss-Prot and PROSITE databases and is useful for determining the classification of uncharacterized proteins translated from genomic or cDNA sequences (Bairoch (supra); Attwood (supra). PROSITE database is a useful source for identifying functional or structural domains that are not detected using motifs due to extreme sequence divergence. Using weight matrices, these domains are calibrated against the SWISS-PROT database to obtain a measure of the chance distribution of the matches.

[0184] The PRINTS database can be searched using the BLIMPS search program to obtain protein family “fingerprints”. The PRINTS database complements the PROSITE database by exploiting groups of conserved motifs within sequence alignments to build characteristic signatures of different protein families. For both BLOCKS and PRINTS analyses, the cutoff scores for local similarity were: >1300=strong, 1000-1300=suggestive; for global similarity were: p<exp-3; and for strength (degree of correlation) were: >1300=strong, 1000-1300=weak.

[0185] X Other Hybridization Technologies and Analyses

[0186] Other hybridization technologies utilize a variety of substrates such as nylon membranes, capillary tubes, etc. Arranging cDNAs on polymer coated slides is described in Example V; sample cDNA preparation and hybridization and analysis using polymer coated slides is described in examples VI and VII, respectively.

[0187] The cDNAs are applied to a membrane substrate by one of the following methods. A mixture of cDNAs is fractionated by gel electrophoresis and transferred to a nylon membrane by capillary transfer. Alternatively, the cDNAs are individually ligated to a vector and inserted into bacterial host cells to form a library. The cDNAs are then arranged on a substrate by one of the following methods. In the first method, bacterial cells containing individual clones are robotically picked and arranged on a nylon membrane. The membrane is placed on LB agar containing selective agent (carbenicillin, kanamycin, ampicillin, or chloramphenicol depending on the vector used) and incubated at 37° C. for 16 hr. The membrane is removed from the agar and consecutively placed colony side up in 10% SDS, denaturing solution (1.5 M NaCl, 0.5 M NaOH), neutralizing solution (1.5 M NaCl, 1 M Tris, pH 8.0), and twice in 2×SSC for 10 min each. The membrane is then UV irradiated in a STRATALINKER UV-crosslinker (Stratagene).

[0188] In the second method, cDNAs are amplified from bacterial vectors by thirty cycles of PCR using primers complementary to vector sequences flanking the insert. PCR amplification increases a starting concentration of 1-2 ng nucleic acid to a final quantity greater than 5 μg. Amplified nucleic acids from about 400 bp to about 5000 bp in length are purified using SEPHACRYL-400 beads (APB). Purified nucleic acids are arranged on a nylon membrane manually or using a dot/slot blotting manifold and suction device and are immobilized by denaturation, neutralization, and UV irradiation as described above.

[0189] Hybridization probes derived from cDNAs of the Sequence Listing are employed for screening cDNAs, mRNAs, or genomic DNA in membrane-based hybridizations. Probes are prepared by diluting the cDNAs to a concentration of 40-50 ng in 45 μl TE buffer, denaturing by heating to 100° C. for five min and briefly centrifuging. The denatured cDNA is then added to a REDIPRIME tube (APB), gently mixed until blue color is evenly distributed, and briefly centrifuged. Five microliters of [³²P]dCTP is added to the tube, and the contents are incubated at 37° C. for 10 min. The labeling reaction is stopped by adding 5 μl of 0.2M EDTA, and probe is purified from unincorporated nucleotides using a PROBEQUANT G-50 microcolumn (APB). The purified probe is heated to 100° C. for five min and then snap cooled for two min on ice.

[0190] Membranes are pre-hybridized in hybridization solution containing 1% Sarkosyl and 1×high phosphate buffer (0.5 M NaCl, 0.1 M Na₂HPO₄, 5 mM EDTA, pH 7) at 55° C. for two hr. The probe, diluted in 15 ml fresh hybridization solution, is then added to the membrane. The membrane is hybridized with the probe at 55° C. for 16 hr. Following hybridization, the membrane is washed for 15 min at 25° C. in 1 mM Tris (pH 8.0), 1% Sarkosyl, and four times for 15 min each at 25° C. in 1 mM Tris (pH 8.0). To detect hybridization complexes, XOMAT-AR film (Eastman Kodak, Rochester N.Y.) is exposed to the membrane overnight at −70° C., developed, and examined.

[0191] XI Expression of the Encoded Protein

[0192] Expression and purification of a protein encoded by a cDNA of the invention is achieved using bacterial or virus-based expression systems. For expression in bacteria, cDNA is subcloned into a vector containing an antibiotic resistance gene and an inducible promoter that directs high levels of cDNA transcription. Examples of such promoters include, but are not limited to, the trp-lac (tac) hybrid promoter and the T5 or T7 bacteriophage promoter in conjunction with the lac operator regulatory element.

[0193] Recombinant vectors are transformed into bacterial hosts, such as BL21 (DE3). Antibiotic resistant bacteria express the protein upon induction with IPTG. Expression in eukaryotic cells is achieved by infecting Spodoptera frugiperda (Sf9) insect cells with recombinant baculovirus, Autographica californica nuclear polyhedrosis virus. The polyhedrin gene of baculovirus is replaced with the cDNA by either homologous recombination or bacterial-mediated transposition involving transfer plasmid intermediates.

[0194] Viral infectivity is maintained and the strong polyhedrin promoter drives high levels of transcription. For ease of purification, the protein is synthesized as a fusion protein with glutathione-S-transferase (GST; APB) or a similar alternative such as FLAG. The fusion protein is purified on immobilized glutathione under conditions that maintain protein activity and antigenicity. After purification, the GST moiety is proteolytically cleaved from the protein with thrombin. A fusion protein with FLAG, an 8-amino acid peptide, is purified using commercially available monoclonal and polyclonal anti-FLAG antibodies (Eastman Kodak, Rochester N.Y.).

[0195] XII Production of Specific Antibodies

[0196] A denatured protein from a reverse phase HPLC separation is obtained in quantities up to 75 mg. This denatured protein is used to immunize mice or rabbits following standard protocols. About 100 μg is used to immunize a mouse, while up to 1 mg is used to immunize a rabbit. The denatured protein is radioiodinated and incubated with murine B-cell hybridomas to screen for monoclonal antibodies. About 20 mg of protein is sufficient for labeling and screening several thousand clones.

[0197] In another approach, the amino acid sequence translated from a cDNA of the invention is analyzed using PROTEAN software (DNASTAR) to determine antigenic determinants of the protein. The optimal sequences for immunization are usually at the C-terminus, the N-terminus, and those intervening, hydrophilic regions of the protein that are likely to be exposed to the external environment when the protein is in its natural conformation. Typically, oligopeptides about 15 residues in length are synthesized using an 431 peptide synthesizer (ABI) using Fmoc-chemistry and then coupled to keyhole limpet hemocyanin (KLH; Sigma-Aldrich) by reaction with M-maleimidobenzoyl-N-hydroxysuccinimide ester. If necessary, a cysteine may be introduced at the N-terminus of the peptide to permit coupling to KLH. Rabbits are immunized with the oligopeptide-KLH complex in complete Freund's adjuvant. The resulting antisera are tested for antipeptide activity by binding the peptide to plastic, blocking with 1% BSA, reacting with rabbit antisera, washing, and reacting with radioiodinated goat anti-rabbit IgG.

[0198] Hybridomas are prepared and screened using standard techniques. Hybridomas of interest are detected by screening with radioiodinated protein to identify those fusions producing a monoclonal antibody specific for the protein. In a typical protocol, wells of 96 well plates (FAST, Becton-Dickinson, Palo Alto Calif.) are coated with affinity-purified, specific rabbit-anti-mouse (or suitable anti-species Ig) antibodies at 10 mg/ml. The coated wells are blocked with 1% BSA and washed and exposed to supernatants from hybridomas. After incubation, the wells are exposed to radiolabeled protein at 1 mg/ml. Clones producing antibodies bind a quantity of labeled protein that is detectable above background.

[0199] Such clones are expanded and subjected to 2 cycles of cloning at 1 cell/3 wells. Cloned hybridomas are injected into pristane-treated mice to produce ascites, and monoclonal antibody is purified from the ascitic fluid by affinity chromatography on protein A (APB). Monoclonal antibodies with affinities of at least 10⁸ M⁻¹, preferably 10⁹ to 10¹⁰ M⁻¹ or stronger, are made by procedures well known in the art.

[0200] XIII Purification of Naturally Occurring Protein Using Specific Antibodies

[0201] Naturally occurring or recombinant protein is purified by immunoaffinity chromatography using antibodies specific for the protein. An immunoaffinity column is constructed by covalently coupling the antibody to CNBr-activated SEPHAROSE resin (APB). Media containing the protein is passed over the immunoaffinity column, and the column is washed using high ionic strength buffers in the presence of detergent to allow preferential absorbance of the protein. After coupling, the protein is eluted from the column using a buffer of pH 2-3 or a high concentration of urea or thiocyanate ion to disrupt antibody/protein binding, and the protein is collected.

[0202] XIV Screening Molecules for Specific Binding With the cDNA or Protein

[0203] The cDNA or fragments thereof and the protein or portions thereof are labeled with ³²P-dCTP, Cy3-dCTP, Cy5-dCTP (APB), or BIODIPY or FITC (Molecular Probes), respectively. Candidate molecules or compounds previously arranged on a substrate are incubated in the presence of labeled nucleic or amino acid. After incubation under conditions for either a cDNA or a protein, the substrate is washed, and any position on the substrate retaining label, which indicates specific binding or complex formation, is assayed. The binding molecule is identified by its arrayed position on the substrate. Data obtained using different concentrations of the nucleic acid or protein are used to calculate affinity between the labeled nucleic acid or protein and the bound molecule. High throughput screening using very small assay volumes and very small amounts of test compound is fully described in U.S. Pat. No. 5,876,946.

[0204] All patents and publications mentioned in the specification are incorporated herein by reference. Various modifications and variations of the described method and system of the invention will be apparent to those skilled in the art without departing from the scope and spirit of the invention. Although the invention has been described in connection with specific preferred embodiments, it should be understood that the invention as claimed should not be unduly limited to such specific embodiments. Indeed, various modifications of the described modes for carrying out the invention that are obvious to those skilled in the field of molecular biology or related fields are intended to be within the scope of the following claims.

TABLE 1

| | | | | | | | | 1368 | 1497 | 1569 |
|---|---|---|---|---|---|---|---|---|---|---|
| CloneID | HAEC | HCAEC | HPAEC | HIAEC | UtMVEC | HMVECD | HUAEC | HUVEC | HUVEC | HUVEC |
| 311197 | ND | 0.28 | ND | 0.12 | 0.15 | −1.43 | 0.18 | −0.11 | 0.04 | 0.16 |
| 2586533 | ND | 0.03 | ND | ND | −0.17 | −0.66 | −0.05 | ND | ND | ND |
| 2539263 | −0.35 | −0.25 | −0.49 | −0.10 | −0.48 | −0.65 | −0.54 | ND | −0.48 | −0.14 |
| 2228990 | ND | 0.16 | ND | −0.04 | −0.50 | −0.61 | −0.12 | −0.25 | 0.09 | 0.09 |
| 3126622 | ND | −0.50 | ND | 0.23 | 0.26 | −0.64 | −0.17 | −0.16 | 0.19 | 0.14 |
| 1612384 | ND | −0.38 | ND | −0.36 | ND | −0.60 | ND | ND | ND | −0.38 |
| 924936 | ND | 0.03 | ND | −0.28 | 0.17 | −0.62 | 0.36 | −0.26 | ND | −0.06 |
| 1655416 | ND | ND | ND | ND | ND | −1.25 | ND | ND | ND | ND |
| 1746640 | ND | −0.13 | ND | −0.18 | −0.18 | −0.79 | −0.27 | −0.12 | −0.14 | −0.19 |
| 2325661 | −0.07 | −0.24 | −0.08 | 0.05 | −0.16 | −0.59 | −0.08 | ND | 0.15 | −0.06 |
| 2373263 | ND | −0.33 | ND | −0.26 | ND | −0.59 | ND | ND | ND | −0.17 |
| 2510835 | ND | −0.28 | ND | −0.26 | −0.35 | −0.78 | −0.19 | −0.12 | −0.18 | −0.05 |
| 3206154 | ND | −0.49 | ND | 0.10 | −0.19 | −0.59 | −0.33 | −0.31 | −0.32 | 0.10 |
| 3249851 | ND | 0.02 | ND | ND | ND | −0.63 | ND | ND | ND | ND |
| 3600367 | ND | ND | ND | ND | ND | −0.61 | ND | ND | ND | ND |
| 3891867 | ND | −0.01 | ND | −0.23 | 0.03 | −0.59 | −0.06 | ND | −0.22 | −0.26 |
| 3972234 | −0.21 | −0.22 | −0.24 | −0.08 | −0.14 | −0.61 | −0.33 | ND | −0.35 | −0.25 |
| 3973887 | ND | −0.09 | ND | −0.01 | −0.02 | −0.61 | −0.06 | −0.08 | −0.17 | 0.03 |
| 4514944 | ND | 0.38 | ND | 0.40 | −0.42 | −0.89 | 0.02 | 0.07 | 0.06 | −0.02 |
| 797406 | ND | −0.23 | ND | −0.10 | −0.08 | −0.59 | −0.40 | 0.00 | 0.02 | −0.13 |
| 1655734 | ND | ND | ND | ND | ND | −0.82 | ND | ND | ND | ND |
| 1817646 | ND | −0.16 | ND | 0.14 | 0.19 | −0.71 | 0.09 | 0.25 | 0.34 | 0.19 |
| 2278772 | ND | −0.29 | ND | −0.46 | −0.13 | −0.70 | −0.30 | ND | −0.41 | −0.12 |
| 2739076 | ND | −0.44 | ND | −0.30 | −0.61 | −0.71 | −0.52 | −0.35 | ND | −0.46 |
| 2828159 | ND | 0.01 | ND | −0.02 | −0.04 | −0.65 | −0.07 | 0.02 | −0.16 | 0.05 |
| 3068978 | ND | −0.15 | ND | −0.49 | −0.16 | −0.69 | −0.17 | ND | −0.03 | 0.20 |
| 3172265 | ND | 0.57 | ND | −0.12 | 0.29 | −0.72 | 0.77 | ND | 0.29 | 0.53 |
| 3639751 | −0.02 | −0.17 | 0.21 | 0.22 | 0.29 | −0.60 | 0.31 | ND | 0.45 | 0.31 |
| 3734094 | ND | −0.38 | ND | −0.24 | −0.49 | −0.60 | −0.46 | −0.07 | ND | −0.47 |
| 3804843 | ND | −0.36 | ND | −0.19 | −0.11 | −0.58 | −0.34 | −0.28 | −0.24 | −0.09 |
| 4092750 | ND | 0.04 | ND | ND | 0.09 | −0.65 | 0.08 | −0.05 | 0.02 | ND |
| 4175323 | ND | −0.21 | ND | 0.11 | −0.42 | −0.66 | −0.21 | −0.30 | ND | −0.25 |
| 4380064 | ND | −0.33 | ND | −0.09 | −0.05 | −0.68 | −0.22 | ND | −0.18 | −0.06 |
| 4413637 | ND | 0.23 | ND | 0.33 | 0.44 | −0.69 | 0.19 | −0.08 | 0.31 | 0.49 |
| 4543123 | ND | −0.43 | ND | −0.01 | −0.30 | −0.64 | −0.16 | ND | −0.42 | −0.04 |
| 4571104 | ND | −0.31 | ND | 0.10 | −0.45 | −0.58 | −0.39 | −0.27 | −0.39 | −0.11 |
| 4853673 | ND | −0.11 | ND | 0.15 | −0.03 | −0.66 | −0.12 | 0.07 | −0.02 | ND |
| 5271674 | ND | −0.19 | ND | −0.14 | −0.07 | −0.68 | −0.08 | ND | −0.13 | −0.03 |
| 5293028 | ND | −0.31 | ND | 0.22 | 0.07 | −0.69 | 0.32 | ND | −0.21 | 0.47 |
| 5509328 | −0.17 | 0.48 | 0.09 | 0.32 | −0.54 | −0.81 | −0.22 | ND | −0.21 | −0.37 |
| 5682290 | −0.03 | 0.12 | 0.32 | 0.05 | −0.03 | −0.97 | 0.11 | ND | 0.30 | 0.19 |
| 5903108 | −0.25 | −0.30 | −0.43 | −0.11 | −0.26 | −0.62 | −0.29 | ND | −0.30 | −0.20 |
| 2717435 | ND | −0.46 | ND | −0.25 | −0.60 | 0.29 | −0.10 | 0.29 | −0.05 | −0.09 |
| 5013541 | ND | −0.06 | ND | 0.01 | −0.67 | −0.01 | −0.01 | ND | −0.03 | −0.04 |
| 1405844 | ND | 0.64 | ND | −0.31 | −0.62 | −0.44 | −0.40 | −0.58 | −0.41 | −0.38 |
| 1624102 | −0.05 | −0.18 | −0.25 | −0.01 | −0.63 | 0.22 | −0.29 | ND | −0.15 | −0.17 |
| 1889028 | ND | −0.40 | ND | −0.34 | −0.74 | −0.04 | −0.27 | −0.24 | −0.29 | −0.22 |
| 2175008 | ND | −0.47 | ND | −0.50 | −0.94 | 0.13 | −0.28 | −0.08 | ND | −0.45 |
| 4252862 | ND | −0.11 | ND | −0.21 | −0.75 | −0.08 | −0.21 | ND | −0.06 | −0.08 |
| 4521868 | ND | −0.18 | ND | −0.20 | −0.69 | −0.06 | −0.32 | ND | −0.26 | −0.16 |
| 682741 | ND | 0.25 | ND | 0.01 | −0.77 | −0.35 | −0.26 | −0.30 | ND | −0.40 |
| 2042056 | ND | 0.07 | ND | −0.04 | −0.58 | −0.20 | −0.31 | −0.42 | −0.42 | −0.38 |
| 2416447 | ND | −0.16 | ND | −0.24 | −0.76 | −0.53 | 0.00 | −0.26 | 0.18 | −0.06 |
| 2462908 | ND | −0.26 | ND | −0.22 | −0.58 | 0.28 | −0.23 | −0.08 | −0.35 | −0.11 |
| 2727104 | 0.09 | 0.11 | 0.36 | 0.01 | −0.85 | 0.06 | −0.07 | ND | 0.14 | 0.11 |
| 2739076 | ND | −0.44 | ND | −0.30 | −0.61 | −0.71 | −0.52 | −0.35 | ND | −0.46 |
| 3426776 | ND | ND | ND | ND | −0.67 | −0.43 | ND | ND | ND | ND |
| 3961930 | ND | 0.04 | ND | −0.07 | −0.96 | −0.02 | 0.05 | ND | 0.00 | 0.05 |
| 3970808 | ND | −0.06 | ND | −0.04 | −0.86 | 0.10 | 0.03 | ND | 0.10 | 0.02 |
| 3982273 | ND | 0.06 | ND | 0.05 | −0.67 | 0.05 | 0.17 | ND | 0.11 | 0.14 |
| 4090358 | ND | 0.10 | ND | 0.11 | −0.68 | 0.05 | 0.16 | ND | 0.07 | 0.00 |
| 4146967 | −0.04 | 0.06 | 0.14 | 0.12 | −0.78 | 0.07 | −0.14 | ND | ND | 0.10 |
| 4185527 | ND | −0.09 | ND | 0.02 | −1.39 | 0.03 | −0.05 | ND | −0.10 | −0.06 |
| 4219295 | ND | −0.22 | ND | −0.27 | −1.35 | −0.12 | −0.28 | ND | −0.09 | −0.16 |
| 4306221 | ND | −0.04 | ND | −0.20 | −0.59 | −0.02 | −0.09 | ND | −0.06 | −0.05 |
| 4334474 | ND | 0.14 | ND | 0.27 | −1.63 | −0.18 | 0.15 | ND | 0.06 | 0.22 |
| 4383888 | ND | −0.06 | ND | −0.12 | −1.27 | 0.23 | −0.01 | ND | 0.06 | −0.04 |
| 4420064 | ND | −0.04 | ND | −0.03 | −0.60 | 0.18 | 0.05 | ND | 0.02 | 0.07 |
| 4422135 | ND | −0.01 | ND | 0.01 | −0.60 | 0.17 | −0.02 | ND | −0.01 | 0.07 |
| 4508211 | ND | −0.05 | ND | −0.07 | −0.97 | 0.14 | −0.10 | ND | 0.09 | 0.00 |
| 4533406 | ND | −0.14 | ND | 0.00 | −0.73 | 0.05 | −0.13 | ND | 0.07 | 0.12 |
| 4561939 | ND | −0.10 | ND | 0.06 | −1.49 | 0.21 | −0.07 | ND | −0.08 | 0.06 |
| 4606503 | ND | 0.00 | ND | −0.01 | −1.48 | 0.07 | 0.04 | ND | 0.05 | 0.06 |
| 4633555 | ND | 0.17 | ND | 0.15 | −1.42 | 0.01 | 0.09 | ND | 0.08 | 0.03 |
| 4636285 | ND | −0.06 | ND | 0.03 | −0.97 | 0.12 | 0.08 | ND | 0.08 | 0.09 |
| 4639612 | ND | 0.08 | ND | 0.02 | −1.25 | 0.06 | 0.13 | ND | 0.12 | 0.13 |
| 4704961 | ND | 0.02 | ND | 0.11 | −1.14 | 0.07 | −0.04 | ND | 0.02 | 0.01 |
| 4710591 | ND | −0.03 | ND | 0.05 | −1.53 | 0.13 | −0.05 | ND | −0.17 | 0.00 |
| 4718317 | ND | 0.08 | ND | 0.06 | −1.04 | −0.08 | 0.12 | ND | 0.05 | −0.02 |
| 4766304 | ND | −0.04 | ND | −0.03 | −0.62 | 0.14 | 0.11 | ND | −0.02 | −0.04 |
| 4771265 | ND | −0.11 | ND | 0.07 | −0.69 | 0.07 | 0.03 | ND | −0.03 | −0.02 |
| 4860482 | ND | −0.02 | ND | 0.02 | −0.73 | 0.07 | −0.06 | ND | −0.03 | 0.00 |
| 4875773 | ND | −0.03 | ND | 0.14 | −0.92 | 0.04 | 0.02 | ND | 0.09 | −0.01 |
| 4886749 | ND | 0.09 | ND | 0.04 | −1.02 | 0.07 | 0.15 | ND | 0.07 | 0.08 |
| 5024011 | ND | −0.10 | ND | 0.02 | −0.79 | 0.05 | −0.18 | ND | −0.09 | −0.06 |
| 5069809 | ND | −0.01 | ND | −0.03 | −1.10 | −0.01 | 0.00 | ND | 0.12 | 0.08 |
| 5094869 | ND | −0.12 | ND | 0.03 | −0.73 | 0.18 | −0.04 | ND | 0.11 | −0.01 |
| 5099959 | ND | −0.04 | ND | −0.21 | −0.73 | −0.03 | −0.17 | ND | −0.04 | −0.13 |
| 5219277 | ND | 0.17 | ND | 0.06 | −1.10 | 0.18 | 0.07 | ND | 0.13 | 0.16 |
| 5262750 | ND | 0.13 | ND | 0.12 | −0.83 | −0.09 | 0.08 | ND | 0.06 | −0.03 |
| 5265974 | ND | −0.12 | ND | −0.07 | −1.67 | 0.04 | −0.03 | ND | 0.01 | 0.06 |
| 5407110 | ND | ND | ND | ND | −1.24 | ND | 0.12 | ND | ND | 0.20 |
| 5508135 | ND | 0.13 | ND | 0.05 | −1.15 | −0.17 | 0.20 | ND | −0.09 | −0.02 |
| 5639879 | −0.42 | −0.47 | −0.28 | −0.43 | −0.64 | 0.07 | −0.18 | ND | −0.30 | −0.23 |
| 5680271 | ND | −0.11 | ND | −0.10 | −1.78 | 0.04 | −0.16 | ND | −0.11 | −0.08 |

[0205] TABLE 2

| | avg log2 ratio | avg log2 ratio | Δ MV and |
|---|---|---|---|
| Clone ID | MV | non-MV | non-MV |
| 1624543 | −1.36 | 0.88 | −2.25 |
| 2527665 | −1.17 | 0.29 | −1.46 |
| 2069806 | 0.22 | 1.63 | −1.41 |
| 5407110 | −1.24 | 0.16 | −1.40 |
| 3180888 | −0.74 | 0.55 | −1.29 |
| 2862539 | −0.84 | 0.39 | −1.22 |
| 1558081 | −0.96 | 0.24 | −1.20 |
| 3428945 | −0.77 | 0.37 | −1.14 |
| 4175376 | −0.51 | 0.57 | −1.08 |
| 4334474 | −0.90 | 0.14 | −1.05 |
| 1555545 | −0.50 | 0.46 | −0.96 |
| 392380 | −0.10 | 0.80 | −0.90 |
| 302934 | −0.16 | 0.73 | −0.89 |
| 1921574 | −0.54 | 0.35 | −0.88 |
| 1963963 | −0.48 | 0.39 | −0.87 |
| 4737158 | −0.36 | 0.51 | −0.86 |
| 2656707 | −0.76 | 0.08 | −0.85 |
| 211389 | −0.06 | 0.77 | −0.82 |
| 2009822 | 0.03 | 0.85 | −0.81 |
| 3328081 | −0.34 | 0.47 | −0.81 |
| 4633555 | −0.71 | 0.09 | −0.80 |
| 1938951 | −0.10 | 0.70 | −0.80 |
| 2955269 | −0.68 | 0.11 | −0.80 |
| 5265974 | −0.81 | −0.02 | −0.79 |
| 3172586 | −0.69 | 0.08 | −0.78 |
| 275587 | 0.00 | 0.77 | −0.78 |
| 3205003 | −0.48 | 0.28 | −0.76 |
| 148825 | 0.00 | 0.76 | −0.76 |
| 1959179 | −0.52 | 0.24 | −0.76 |
| 3735389 | −0.69 | 0.06 | −0.76 |
| 4514944 | −0.65 | 0.10 | −0.75 |
| 3172265 | −0.21 | 0.54 | −0.75 |
| 5680271 | −0.87 | −0.12 | −0.75 |
| 311197 | −0.64 | 0.11 | −0.75 |
| 4606503 | −0.70 | 0.04 | −0.74 |
| 263340 | 0.00 | 0.74 | −0.74 |
| 1887959 | −0.88 | −0.15 | −0.73 |
| 289407 | 0.06 | 0.79 | −0.73 |
| 318182 | −0.12 | 0.61 | −0.73 |
| 1909038 | −0.44 | 0.29 | −0.73 |
| 2005968 | −0.04 | 0.69 | −0.73 |
| 5026408 | −0.65 | 0.08 | −0.72 |
| 341884 | −0.08 | 0.65 | −0.72 |
| 351475 | 0.02 | 0.74 | −0.72 |
| 680 | 0.01 | 0.73 | −0.72 |
| 2007151 | 0.04 | 0.76 | −0.72 |
| 1938947 | 0.01 | 0.73 | −0.72 |
| 82954 | −0.03 | 0.69 | −0.72 |
| 58000 | −0.05 | 0.67 | −0.72 |
| 5508135 | −0.66 | 0.06 | −0.71 |
| 44877 | −0.10 | 0.61 | −0.71 |
| 4639612 | −0.60 | 0.11 | −0.71 |
| 3182642 | −0.35 | 0.35 | −0.70 |
| 508113 | 0.03 | 0.72 | −0.69 |
| 387305 | −0.15 | 0.54 | −0.69 |
| 1447055 | −0.34 | 0.34 | −0.69 |
| 3519816 | −0.31 | 0.38 | −0.68 |
| 419316 | 0.08 | 0.75 | −0.67 |
| 5047895 | −0.83 | −0.16 | −0.67 |
| 320332 | −0.21 | 0.46 | −0.67 |
| 499848 | −0.04 | 0.63 | −0.67 |
| 5501816 | −0.58 | 0.10 | −0.67 |
| 5682290 | −0.50 | 0.17 | −0.67 |
| 1358185 | −0.35 | 0.32 | −0.67 |
| 219488 | −0.04 | 0.63 | −0.67 |
| 2137464 | −0.36 | 0.31 | −0.67 |
| 2137041 | −0.37 | 0.29 | −0.66 |
| 96425 | −0.60 | 0.06 | −0.66 |
| 3249851 | −0.63 | 0.02 | −0.65 |
| 345378 | 0.06 | 0.71 | −0.65 |
| 385550 | −0.04 | 0.61 | −0.65 |
| 349854 | 0.07 | 0.71 | −0.65 |
| 42920 | −0.20 | 0.44 | −0.65 |
| 2776 | −0.02 | 0.63 | −0.64 |
| 238793 | −0.07 | 0.57 | −0.64 |
| 1599036 | −0.33 | 0.31 | −0.64 |
| 2924347 | −0.39 | 0.24 | −0.64 |
| 465496 | 0.07 | 0.71 | −0.64 |
| 284124 | −0.02 | 0.62 | −0.64 |
| 464323 | 0.01 | 0.65 | −0.64 |
| 4710591 | −0.70 | −0.06 | −0.63 |
| 388931 | 0.09 | 0.72 | −0.63 |
| 3086929 | −0.50 | 0.13 | −0.63 |
| 2011839 | 0.04 | 0.67 | −0.63 |
| 1987738 | −0.43 | 0.19 | −0.62 |
| 75549 | 0.02 | 0.65 | −0.62 |
| 4718317 | −0.56 | 0.06 | −0.62 |
| 1995380 | −0.26 | 0.36 | −0.62 |
| 4386789 | −0.11 | 0.50 | −0.61 |
| 408522 | 0.04 | 0.65 | −0.61 |
| 5509328 | −0.67 | −0.07 | −0.61 |
| 274627 | 0.03 | 0.64 | −0.61 |
| 4185527 | −0.68 | −0.07 | −0.61 |
| 414891 | 0.00 | 0.61 | −0.61 |
| 5069809 | −0.55 | 0.05 | −0.60 |
| 278282 | −0.02 | 0.58 | −0.60 |
| 9079 | 0.00 | 0.61 | −0.60 |
| 241643 | −0.02 | 0.58 | −0.60 |
| 44525 | 0.01 | 0.60 | −0.60 |
| 4561939 | −0.64 | −0.05 | −0.60 |

[0206] TABLE 3

| | | | | | | | | 1368 | 1497 | 1569 |
|---|---|---|---|---|---|---|---|---|---|---|
| CloneID | HAEC | HCAEC | HPAEC | HIAEC | UtMVEC | HMVECD | HUAEC | HUVEC | HUVEC | HUVEC |
| 4398915 | −0.82 | −0.51 | −0.23 | −0.52 | 0.09 | −0.42 | 0.23 | ND | −0.02 | 0.38 |
| 2947513 | −0.58 | −0.43 | −0.30 | −0.13 | −0.15 | −0.29 | −0.20 | ND | −0.46 | −0.15 |
| 2152363 | −0.71 | −0.42 | −0.21 | −0.33 | −0.13 | −0.44 | −0.43 | ND | −0.27 | −0.23 |
| 5680843 | −0.65 | −0.35 | −0.24 | −0.26 | 0.05 | −0.17 | −0.23 | ND | −0.32 | 0.01 |
| 3099768 | −0.74 | −0.30 | 0.14 | −0.08 | −0.11 | −0.29 | −0.19 | ND | −0.21 | −0.16 |
| 5911570 | −0.63 | −0.24 | −0.23 | −0.29 | 0.15 | −0.01 | −0.11 | ND | −0.20 | 0.07 |
| 5902267 | −1.00 | −0.22 | −0.37 | −0.12 | −0.15 | −0.51 | −0.65 | ND | −0.41 | −0.44 |
| 4557571 | −0.73 | −0.22 | −0.38 | −0.29 | −0.17 | −0.44 | −0.32 | ND | −0.27 | −0.52 |
| 5911592 | −0.87 | −0.16 | −0.47 | −0.17 | −0.36 | −0.45 | −0.86 | ND | −0.32 | −0.30 |
| 5519430 | −0.62 | −0.03 | −0.29 | −0.21 | 0.01 | 0.07 | −0.02 | ND | −0.22 | −0.07 |
| 1969756 | −0.60 | −0.02 | 0.51 | 0.16 | 0.04 | −0.18 | 0.10 | ND | 0.04 | 0.14 |
| 1512990 | −0.60 | 0.02 | 0.72 | 0.15 | −0.01 | −0.01 | 0.16 | ND | −0.04 | −0.03 |
| 4739765 | −0.71 | 0.07 | −0.22 | 0.15 | 0.03 | −0.33 | −0.23 | ND | −0.24 | −0.14 |
| 5046165 | −0.70 | 0.14 | −0.10 | 0.16 | 0.20 | −0.08 | 0.31 | ND | −0.30 | −0.04 |
| 2580580 | −0.62 | 0.20 | 0.66 | 0.15 | 0.12 | −0.02 | 0.10 | ND | 0.08 | 0.13 |
| 760553 | −0.90 | 0.23 | −0.55 | 0.34 | −0.56 | −0.20 | −0.35 | ND | −0.43 | −0.20 |
| 4295711 | −0.68 | 0.28 | 1.07 | 0.11 | 0.12 | 0.02 | 0.11 | ND | −0.08 | 0.15 |
| 431455 | −0.58 | 0.42 | 1.01 | 0.29 | 0.07 | 0.18 | 0.27 | ND | 0.35 | 0.37 |
| 3142396 | −0.85 | 0.55 | −0.13 | 0.64 | −0.21 | −0.11 | −0.07 | ND | −0.04 | −0.21 |
| 3129691 | −0.96 | 0.66 | −0.24 | 0.74 | −0.33 | 0.10 | 0.04 | ND | 0.10 | −0.26 |
| 2962167 | ND | −0.83 | ND | −0.41 | −0.21 | 0.04 | −0.30 | 0.36 | ND | 0.56 |
| 5587406 | ND | −0.79 | ND | −0.10 | 0.35 | 0.10 | −0.72 | 0.10 | −0.03 | 0.07 |
| 2966620 | ND | −0.76 | ND | −0.40 | −0.17 | −0.35 | 0.60 | −0.26 | ND | −0.19 |
| 2895245 | ND | −0.70 | ND | −0.43 | −0.41 | −0.13 | −0.54 | 0.28 | ND | 0.15 |
| 1648251 | ND | −0.70 | ND | −0.58 | −0.11 | −0.30 | −0.67 | −0.43 | ND | −0.54 |
| 1601323 | ND | −0.70 | ND | −0.41 | −0.45 | −0.04 | −0.55 | −0.55 | ND | −0.48 |
| 2047549 | ND | −0.68 | ND | −0.54 | 0.07 | −0.32 | −0.38 | 0.00 | −0.01 | 0.08 |
| 1624459 | ND | −0.68 | ND | −0.36 | −0.49 | −0.17 | −0.53 | 0.22 | 0.00 | 0.29 |
| 2235515 | ND | −0.68 | ND | −0.42 | 0.27 | 0.13 | −0.16 | 0.00 | 0.27 | 0.29 |
| 2771046 | ND | −0.68 | ND | −0.24 | 0.18 | 0.01 | −0.05 | 0.89 | ND | 0.32 |
| 3658034 | ND | −0.67 | ND | −0.51 | −0.06 | 0.01 | 0.13 | 0.15 | 0.38 | 0.71 |
| 2722128 | ND | −0.66 | ND | −0.50 | −0.17 | −0.45 | −0.14 | 0.34 | ND | 0.08 |
| 2845102 | ND | −0.66 | ND | 0.01 | −0.21 | −0.28 | 0.06 | 0.27 | ND | 0.57 |
| 1271606 | ND | −0.66 | ND | −0.42 | −0.19 | −0.45 | −0.53 | −0.13 | ND | −0.56 |
| 2151054 | ND | −0.65 | ND | ND | ND | ND | ND | ND | ND | ND |
| 1600586 | ND | −0.63 | ND | −0.51 | −0.27 | −0.25 | −0.42 | −0.23 | ND | −0.28 |
| 2740187 | ND | −0.61 | ND | −0.04 | 0.05 | −0.21 | −0.17 | 0.25 | ND | −0.02 |
| 4462162 | ND | −0.61 | ND | −0.56 | 0.18 | −0.02 | −0.78 | −0.26 | ND | −0.52 |
| 1510714 | ND | −0.61 | ND | 0.08 | 0.21 | −0.09 | −0.30 | −0.54 | ND | −0.48 |
| 2134968 | ND | −0.60 | ND | −0.42 | −0.42 | −0.04 | −0.34 | −0.17 | ND | −0.20 |
| 2200604 | ND | −0.60 | ND | −0.44 | −0.25 | −0.10 | −0.31 | 0.02 | ND | −0.02 |
| 2657738 | ND | −0.60 | ND | −0.31 | −0.38 | −0.20 | −0.34 | −0.26 | ND | −0.30 |
| 1559731 | ND | −0.60 | ND | −0.48 | 0.06 | −0.22 | −0.31 | 0.18 | ND | 0.09 |
| 3136864 | ND | −0.59 | ND | −0.45 | −0.32 | −0.39 | −0.51 | −0.19 | ND | −0.15 |
| 5198974 | ND | −0.59 | ND | 0.07 | −0.10 | −0.06 | −0.10 | −0.11 | −0.19 | 0.03 |
| 2765165 | ND | −0.59 | ND | −0.44 | −0.25 | −0.15 | −0.49 | ND | −0.27 | −0.33 |
| 1481225 | ND | −0.59 | ND | −0.25 | −0.29 | 0.10 | −0.17 | 0.08 | ND | 0.27 |
| 3088261 | ND | −0.59 | ND | −0.47 | 0.02 | −0.18 | −0.19 | −0.04 | −0.26 | −0.16 |
| 1518328 | ND | −0.59 | ND | −0.50 | 0.68 | 0.06 | −0.45 | 0.31 | ND | 0.23 |
| 1619865 | ND | −0.58 | ND | −0.18 | 0.02 | −0.57 | 0.81 | −0.21 | 0.21 | 0.11 |
| 1551767 | ND | −0.58 | ND | −0.43 | −0.28 | 0.47 | −0.58 | −0.05 | ND | −0.43 |
| 1498947 | ND | −1.11 | ND | −0.63 | 0.24 | 0.16 | 0.03 | 0.27 | 0.44 | 0.35 |
| 3316684 | ND | −0.95 | ND | −0.71 | 0.33 | −0.25 | 0.67 | −0.24 | −0.15 | −0.28 |
| 1617218 | ND | −0.91 | ND | −0.87 | 1.22 | −0.21 | 0.15 | ND | 0.35 | 0.25 |
| 4144001 | ND | −0.83 | ND | −0.83 | 0.95 | −0.19 | −0.01 | 0.13 | 0.23 | 0.14 |
| 2657149 | ND | −0.75 | ND | −0.60 | 0.28 | 0.13 | −0.03 | 0.24 | ND | 0.49 |
| 2455118 | ND | −0.72 | ND | −0.59 | −0.29 | −0.44 | −0.31 | −0.11 | ND | −0.38 |
| 2174441 | ND | −0.69 | ND | −0.69 | 0.70 | −0.10 | −0.61 | −0.47 | ND | −0.23 |
| 1997915 | ND | −0.68 | ND | −0.65 | −0.18 | −0.48 | −0.31 | 0.27 | −0.02 | −0.07 |
| 1357231 | ND | −0.65 | ND | −0.70 | −0.04 | −0.07 | −0.35 | ND | 0.41 | 0.15 |
| 698665 | ND | −0.65 | ND | −0.76 | −0.52 | 0.53 | −0.87 | −0.51 | ND | −0.42 |
| 4295364 | ND | −0.62 | ND | −0.63 | −0.29 | −0.29 | −0.49 | 0.04 | ND | −0.28 |
| 1909266 | ND | −0.59 | ND | −0.62 | −0.12 | −0.28 | −0.44 | −0.23 | ND | −0.32 |
| 3132987 | ND | −0.56 | ND | −0.70 | 0.18 | −0.31 | −0.25 | 0.30 | ND | −0.23 |
| 1886842 | ND | −0.55 | ND | −0.65 | −0.33 | −0.47 | −0.55 | −0.48 | ND | −0.36 |
| 4144001 | ND | −0.54 | ND | −0.61 | 0.97 | −0.01 | 0.05 | 0.14 | ND | 0.28 |
| 3596853 | ND | −0.53 | ND | −0.60 | −0.01 | −0.21 | −0.29 | 0.30 | ND | 0.24 |
| 3393606 | ND | −0.53 | ND | −0.67 | 0.22 | 0.36 | 0.08 | 0.67 | 0.63 | 0.44 |
| 693783 | ND | −0.52 | ND | −0.58 | 0.64 | −0.52 | −0.04 | ND | −0.40 | −0.56 |
| 2470485 | ND | −0.46 | ND | −0.77 | 0.09 | −0.01 | −0.10 | 0.06 | ND | 0.22 |
| 3081067 | ND | −0.45 | ND | −0.62 | 0.21 | 0.18 | −0.11 | 0.55 | ND | 0.34 |
| 1313183 | ND | −0.43 | ND | −0.63 | 0.48 | −0.20 | 0.82 | −0.17 | ND | −0.29 |
| 1979792 | ND | −0.37 | ND | −0.66 | −0.28 | −0.50 | −0.56 | −0.46 | ND | −0.33 |
| 494970 | ND | −0.33 | ND | −0.60 | 0.03 | 0.16 | −0.21 | ND | 0.06 | 0.07 |
| 3030988 | ND | −0.28 | ND | −0.62 | −0.19 | −0.22 | −0.47 | −0.28 | ND | −0.26 |
| 2453436 | ND | −0.06 | ND | −0.60 | −0.29 | 0.07 | −0.58 | −0.25 | ND | −0.12 |
| 129009 | ND | 0.05 | ND | −0.60 | −0.05 | −0.13 | −0.34 | 0.64 | ND | 0.12 |
| 2220338 | ND | 0.05 | ND | −0.75 | −0.20 | −0.12 | −0.52 | −0.26 | ND | 0.05 |
| 1581451 | −0.51 | −0.29 | −0.79 | 0.05 | 0.03 | −0.05 | 0.41 | ND | 0.38 | 0.21 |
| 3598343 | 0.04 | −0.06 | −0.68 | −0.14 | −0.34 | −0.14 | −0.18 | ND | −0.20 | −0.26 |

[0207] TABLE 4

| SEQ ID NO | Template ID | Clone ID | Start | Stop |
|---|---|---|---|---|
| 1 | 1383156.23 | 311197 | 36 | 607 |
| 2 | 1097334.8 | 2586533 | 533 | 940 |
| 3 | 1330210.32 | 2539263 | 1 | 521 |
| 4 | 1330210.33 | 2539263 | 1043 | 1568 |
| 5 | 978840.1 | 2228990 | 15 | 1740 |
| 6 | 1850670CB1 | 3126622 | 115 | 2046 |
| 7 | 427830.26 | 1612384 | 371 | 802 |
| 8 | 002838.45 | 924936 | 113 | 534 |
| 8 | 002838.45 | 3891867 | 74 | 536 |
| 9 | 002838.44 | 924936 | 226 | 924 |
| 10 | 1451265CB1 | 1655416 | 250 | 1459 |
| 11 | 347284.6 | 1746640 | 2375 | 2776 |
| 12 | 255966.9 | 2325661 | 1472 | 1734 |
| 13 | 406387.7 | 2373263 | 5565 | 6689 |
| 14 | 062199.7 | 2510835 | 630 | 3421 |
| 15 | 1383059.61 | 3206154 | 737 | 1305 |
| 16 | 332595.5 | 3249851 | 160 | 733 |
| 17 | 332595.12 | 3249851 | 4134 | 4685 |
| 18 | 5401223CB1 | 3600367 | 4817 | 5226 |
| 19 | 002838.40 | 3891867 | 346 | 659 |
| 20 | 378186.30 | 3972234 | 109 | 638 |
| 20 | 378186.30 | 5903108 | 231 | 506 |
| 21 | 348196.83 | 3973887 | 1 | 321 |
| 22 | 348196.89 | 3973887 | 5446 | 5720 |
| 23 | 1136856.23 | 4514944 | 564 | 1065 |
| 24 | 1136856.25 | 4514944 | 1198 | 1615 |
| 25 | 101575.1 | 797406 | 853 | 1279 |
| 26 | 276310.1 | 1655734 | 1 | 275 |
| 27 | 014284CB1 | 1817646 | 1360 | 1854 |
| 28 | 272599.1 | 2278772 | 1 | 278 |
| 29 | 1383712.24 | 2739076 | 183 | 657 |
| 30 | 1820861CB1 | 2828159 | 18 | 439 |
| 31 | 330902.2 | 2828159 | 723 | 1137 |
| 32 | 211881.1 | 3068978 | 1 | 548 |
| 33 | 399161.1 | 3172265 | 473 | 1102 |
| 34 | 138206.1 | 3639751 | 1 | 806 |
| 35 | 1241528.18 | 3734094 | 228 | 801 |
| 36 | 1091353.11 | 3804843 | −132 | 287 |
| 37 | 405058.1 | 4092750 | 2916 | 3391 |
| 38 | 406573.9 | 4175323 | 60 | 247 |
| 39 | 3365683CB1 | 4380064 | 132 | 462 |
| 40 | 406992.1 | 4413637 | 875 | 1787 |
| 41 | 399626.1 | 4543123 | −1 | 813 |
| 42 | 474725.3 | 4571104 | 1 | 257 |
| 43 | 402460.13 | 4853673 | 1164 | 1687 |
| 44 | 038033.1 | 5271674 | 28 | 619 |
| 45 | 208075.1 | 5293028 | 417 | 737 |
| 46 | 3479061CB1 | 5509328 | 395 | 1113 |
| 47 | 1454465.1 | 5682290 | 88 | 600 |
| 48 | 378186.29 | 5903108 | 51 | 592 |
| 49 | 330836.4 | 2717435 | 2752 | 3160 |
| 50 | 330836.5 | 2717435 | 1929 | 2391 |
| 51 | 410882.6 | 5013541 | 1082 | 1848 |
| 52 | 1405844CB1 | 1405844 | 72 | 424 |
| 53 | 330933.15 | 1624102 | 4491 | 4895 |
| 54 | 979182.3 | 1889028 | 1751 | 2236 |
| 55 | 1382838.129 | 2175008 | 4210 | 4704 |
| 56 | 898864.15 | 4252862 | 1 | 300 |
| 57 | 033527.1 | 4521868 | 896 | 1523 |
| 58 | 351122.2 | 682741 | 879 | 1348 |
| 59 | 522433CB1 | 2042056 | 4 | 384 |
| 60 | 081187.1 | 2416447 | 1 | 64 |
| 61 | 2462908CB1 | 2462908 | 0 | 1028 |
| 62 | 350416.3 | 2462908 | 1453 | 1650 |
| 63 | 1061366.15 | 2727104 | 29 | 462 |
| 64 | 026200.1 | 3426776 | 1 | 388 |
| 65 | 214744.1 | 3961930 | 1 | 291 |
| 66 | 214811.1 | 3970808 | 297 | 516 |
| 67 | 107572.1 | 3982273 | 1 | 614 |
| 68 | 215003.1 | 4090358 | −82 | 473 |
| 69 | 106250.1 | 4146967 | 1 | 544 |
| 70 | 403668.1 | 4185527 | 144 | 694 |
| 71 | 011664.1 | 4219295 | 54 | 201 |
| 72 | 059849.1 | 4306221 | 858 | 1191 |
| 73 | 1197030.23 | 4334474 | 766 | 1514 |
| 74 | 042195.1 | 4383888 | 1 | 256 |
| 75 | 983907.1 | 4420064 | 1420 | 1861 |
| 76 | 210826.1 | 4422135 | 1778 | 2267 |
| 77 | 343356.1 | 4508211 | 97 | 461 |
| 78 | 1439948.1 | 4533406 | 1 | 546 |
| 79 | 984996.3 | 4561939 | 13 | 552 |
| 80 | 102564.1 | 4606503 | 121 | 520 |
| 81 | 146768.1 | 4633555 | 241 | 747 |
| 82 | 340291.1 | 4636285 | 1 | 405 |
| 83 | 134460.1 | 4639612 | 499 | 924 |
| 84 | 053411.1 | 4704961 | 80 | 571 |
| 85 | 1448208.1 | 4710591 | 256 | 742 |
| 86 | 070655.1 | 4718317 | 97 | 490 |
| 87 | 406389.1 | 4766304 | 697 | 1495 |
| 88 | 167601.1 | 4771265 | 172 | 449 |
| 89 | 341084.1 | 4860482 | 1 | 231 |
| 90 | 404224.1 | 4875773 | 807 | 1490 |
| 91 | 026596.1 | 4886749 | 1 | 499 |
| 92 | 1041038.1 | 5024011 | 1 | 601 |
| 93 | 080588.1 | 5069809 | 1 | 206 |
| 94 | 014408.2 | 5094869 | 633 | 989 |
| 95 | 351752.1 | 5099959 | 853 | 1138 |
| 96 | 002661.1 | 5219277 | 38 | 833 |
| 97 | 399162.11 | 5262750 | 502 | 746 |
| 98 | 174086.1 | 5265974 | 219 | 542 |
| 99 | 116731.1 | 5407110 | 96 | 365 |
| 100 | 1453971.4 | 5508135 | 1819 | 2037 |
| 101 | 347635.1 | 5639879 | 258 | 785 |
| 102 | 1401326.2 | 5680271 | −2 | 1079 |
| 103 | 1330204.51 | 1624543 | 750 | 1807 |
| 104 | 1327351.31 | 2527665 | 1 | 345 |
| 105 | 1327351.35 | 2527665 | 943 | 1530 |
| 106 | 332723.6 | 2069806 | 1883 | 2175 |
| 107 | 1184503.1 | 3180888 | 45 | 567 |
| 108 | 410610.1 | 2862539 | 502 | 771 |
| 109 | 986073.1 | 1558081 | 1571 | 3089 |
| 110 | 1102234.29 | 3428945 | 1 | 1199 |
| 111 | 1102234.28 | 3428945 | 698 | 1194 |
| 112 | 029061.1 | 4175376 | 176 | 1158 |
| 113 | 233180.39 | 1555545 | 889 | 1940 |
| 114 | 010317.1 | 392380 | 252 | 635 |
| 115 | 2007614CB1 | 302934 | 2163 | 2527 |
| 116 | 065582.1 | 1921574 | 1 | 492 |
| 117 | 1188409.1 | 1963963 | 5567 | 6043 |
| 117 | 1188409.15 | 1963963 | 1936 | 2307 |
| 119 | 1102234.75 | 4737158 | 1 | 237 |
| 120 | 403534.6 | 2656707 | 3273 | 4071 |
| 121 | 238349.4 | 211389 | 3334 | 3488 |
| 122 | 017058.1 | 2009822 | 216 | 477 |
| 123 | 190188CB1 | 3328081 | 6981 | 7353 |
| 124 | 1383106.7 | 1938951 | 2878 | 3117 |
| 125 | 1510895.1 | 2955269 | 843 | 1348 |
| 126 | 1454873.5 | 3172586 | 683 | 1217 |
| 127 | 222836.2 | 275587 | 21 | 410 |
| 128 | 3098081CB1 | 3205003 | 687 | 1188 |
| 129 | 1383398.6 | 148825 | 67 | 612 |
| 130 | 1383398.7 | 148825 | 173 | 979 |
| 131 | 198862.10 | 1959179 | 669 | 1046 |
| 132 | 2515360CB1 | 3735389 | 26 | 474 |
| 132 | 2515360CB1 | 1887959 | 4110 | 4667 |
| 133 | 334180.6 | 263340 | 1556 | 2800 |
| 134 | 982535.2 | 289407 | 748 | 1100 |
| 135 | 1501794.11 | 318182 | 3742 | 4129 |
| 136 | 983910CB1 | 1909038 | 399 | 849 |
| 137 | 999097.1 | 2005968 | 902 | 1069 |
| 138 | 293858.32 | 5026408 | 1 | 561 |
| 139 | 1269631CB1 | 341884 | 5433 | 6307 |
| 140 | 337208.11 | 351475 | 1327 | 2388 |
| 141 | 337800.3 | 680 | 1875 | 2134 |
| 142 | 1361343CB1 | 2007151 | 3511 | 3706 |
| 143 | 1504867.1 | 1938947 | 290 | 440 |
| 144 | 410917.13 | 82954 | 1480 | 1625 |
| 145 | 2080904CB1 | 58000 | 676 | 927 |
| 146 | 2520680CB1 | 44877 | 1312 | 1482 |
| 147 | 1274560.12 | 3182642 | 20 | 1177 |
| 148 | 313149.1 | 508113 | 1567 | 1968 |
| 149 | 268514.25 | 387305 | 1522 | 1901 |
| 150 | 2100016CB1 | 1447055 | 17 | 735 |
| 151 | 2906265CB1 | 3519816 | 1 | 464 |
| 152 | 189155.2 | 419316 | 1042 | 1239 |
| 153 | 336733.9 | 5047895 | 1 | 419 |
| 154 | 1273136.1 | 320332 | 1083 | 1471 |
| 155 | 253888.1 | 499848 | 1444 | 1851 |
| 156 | 407570.3 | 5501816 | 1094 | 1274 |
| 157 | 977136.8 | 1358185 | 1 | 425 |
| 158 | 977136.1 | 1358185 | 2274 | 2803 |
| 159 | 1500085.3 | 219488 | 203 | 564 |
| 160 | 1439712.1 | 2137464 | 1 | 630 |
| 161 | 015508.1 | 2137041 | 23 | 414 |
| 162 | 111552CB1 | 96425 | 1391 | 1645 |
| 163 | 1641902CB1 | 345378 | 1011 | 1676 |
| 164 | 252999.1 | 385550 | 874 | 1379 |
| 165 | 977391.15 | 349854 | 1740 | 2103 |
| 166 | 1363208CB1 | 42920 | 2573 | 2827 |
| 167 | 002776CB1 | 2776 | 1604 | 1896 |
| 168 | 140557.23 | 238793 | 2888 | 3029 |
| 169 | 140557.22 | 238793 | 4820 | 4961 |
| 170 | 1286746CB1 | 1599036 | 391 | 1072 |
| 171 | 1102234.13 | 2924347 | 286 | 808 |
| 172 | 1401226.4 | 465496 | 321 | 558 |
| 173 | 331677.2 | 284124 | 4201 | 4705 |
| 174 | 234870.4 | 464323 | 2255 | 2659 |
| 175 | 346051.5 | 3086929 | 474 | 954 |
| 176 | 232055.1 | 2011839 | 720 | 859 |
| 177 | 070248.106 | 1987738 | 38 | 901 |
| 178 | 028253.6 | 75549 | 329 | 508 |
| 179 | 989381.1 | 1995380 | 86 | 951 |
| 180 | 984009.1 | 4386789 | 130 | 1807 |
| 181 | 404758.7 | 408522 | 469 | 653 |
| 182 | 208350.1 | 274627 | 2871 | 3129 |
| 183 | 334193.1 | 414891 | 1242 | 1602 |
| 184 | 335046.8 | 278282 | 63 | 429 |
| 185 | 198947.2 | 9079 | 1153 | 1406 |
| 186 | 014669.1 | 241643 | 994 | 1143 |
| 187 | 2951807CB1 | 44525 | 451 | 683 |
| 188 | 482452.13 | 388931 | 1 | 434 |
| 189 | 2513610CB1 | 4398915 | 39 | 675 |
| 190 | 1376812.4 | 2947513 | 7 | 338 |
| 191 | 1446355.3 | 2152363 | 345 | 805 |
| 192 | 1446355.2 | 2152363 | 757 | 1138 |
| 193 | 365121.1 | 5680843 | 708 | 841 |
| 194 | 1399068.1 | 3099768 | 1 | 367 |
| 195 | 474395.1 | 5911570 | 0 | 588 |
| 196 | 001300.10 | 5902267 | 19 | 429 |
| 197 | 482193.2 | 4557571 | 1 | 294 |
| 198 | 450887.1 | 5911592 | −30 | 569 |
| 199 | 1281959CB1 | 5519430 | 31 | 316 |
| 200 | 197856.4 | 1969756 | 1514 | 1888 |
| 201 | 197856.9 | 1969756 | 756 | 966 |
| 202 | 1088680.3 | 1512990 | 2186 | 2790 |
| 203 | 246020.6 | 4739765 | 529 | 882 |
| 204 | 1446842.1 | 5046165 | 1 | 502 |
| 205 | 2580580CB1 | 2580580 | 520 | 1281 |
| 206 | 1503093.1 | 760553 | 503 | 965 |
| 207 | 338662.1 | 4295711 | 1 | 1043 |
| 208 | 324037.1 | 431455 | 610 | 1245 |
| 209 | 989010.3 | 3142396 | 1 | 780 |
| 210 | 470784CB1 | 3142396 | 16 | 704 |
| 211 | 989010.5 | 3129691 | 279 | 1000 |
| 212 | 473040.1 | 2962167 | 953 | 4477 |
| 213 | 400203.1 | 5587406 | 1234 | 1598 |
| 214 | 474437.17 | 2966620 | 744 | 934 |
| 215 | 1345561CB1 | 2895245 | 486 | 1988 |
| 216 | 1513913CB1 | 1648251 | 761 | 1296 |
| 217 | 1453827.5 | 1601323 | 1028 | 1456 |
| 218 | 199471.2 | 2047549 | 149 | 1452 |
| 219 | 000278CB1 | 1624459 | 39 | 1688 |
| 220 | 233942.1 | 2235515 | 128 | 1984 |
| 221 | 1136923.19 | 2771046 | 1585 | 2068 |
| 222 | 1136923.18 | 2771046 | 3424 | 3644 |
| 223 | 3658034CB1 | 3658034 | 33 | 1112 |
| 224 | 1450005.5 | 2722128 | 708 | 1186 |
| 225 | 1450005.6 | 2722128 | 1771 | 2258 |
| 226 | 464689.64 | 2845102 | 2180 | 4636 |
| 227 | 334388.7 | 1271606 | 227 | 714 |
| 228 | 994660.1 | 2151054 | 1090 | 1518 |
| 229 | 3147649CB1 | 1600586 | 3059 | 4037 |
| 230 | 2652949CB1 | 2740187 | 1 | 1692 |
| 231 | 350300.25 | 4462162 | 6221 | 6833 |
| 232 | 1273213CB1 | 1510714 | 416 | 1968 |
| 233 | 222242.35 | 2134968 | 1 | 1553 |
| 234 | 621792CB1 | 2200604 | 379 | 1464 |
| 235 | 148820CB1 | 2657738 | 1534 | 1980 |
| 236 | 1812221CB1 | 1559731 | 2850 | 4201 |
| 237 | 1504168.4 | 3136864 | 338 | 408 |
| 238 | 109925.11 | 5198974 | 171 | 442 |
| 239 | 1073168.8 | 2765165 | 786 | 4417 |
| 240 | 2239072CB1 | 1481225 | 730 | 2171 |
| 241 | 4767318CB1 | 3088261 | 1282 | 1562 |
| 242 | 1339068CB1 | 1518328 | 1597 | 1933 |
| 243 | 2966620CB1 | 1619865 | 84 | 275 |
| 244 | 1347119.1 | 1551767 | 771 | 3446 |
| 245 | 816792CB1 | 1498947 | 136 | 514 |
| 245 | 816792CB1 | 2657149 | 1379 | 1843 |
| 246 | 1092427.6 | 3316684 | 388 | 642 |
| 246 | 1092427.6 | 1313183 | 4362 | 5823 |
| 247 | 251793.1 | 1617218 | 16 | 651 |
| 248 | 1622869CB1 | 4144001 | 722 | 1109 |
| 249 | 2581158CB1 | 2455118 | 144 | 2070 |
| 250 | 2174441CB1 | 2174441 | 471 | 946 |
| 251 | 235191.3 | 1997915 | 12 | 473 |
| 252 | 235191.4 | 1997915 | 213 | 782 |
| 253 | 1867417CB1 | 1357231 | 3075 | 3752 |
| 254 | 1285632CB1 | 698665 | 1377 | 4119 |
| 255 | 336992.5 | 4295364 | 1431 | 3446 |
| 256 | 1909266CB1 | 1909266 | 23 | 556 |
| 257 | 1214953.16 | 3132987 | −20 | 1965 |
| 258 | 1850092CB1 | 1886842 | 1589 | 2576 |
| 259 | 1555752CB1 | 3596853 | 27 | 3636 |
| 260 | 441283.5 | 3393606 | 5296 | 8423 |
| 261 | 4349106CB1 | 693783 | 344 | 1030 |
| 262 | 2700132CB1 | 2470485 | 412 | 985 |
| 263 | 441283.4 | 3081067 | 713 | 1208 |
| 264 | 2613976CB1 | 1979792 | 961 | 1906 |
| 265 | 337894.8 | 494970 | 1 | 458 |
| 266 | 1452351.17 | 3030988 | 586 | 1971 |
| 267 | 1754695CB1 | 2453436 | 10 | 1489 |
| 268 | 232888.4 | 129009 | 3844 | 5648 |
| 269 | 247817.4 | 2220338 | 3585 | 5794 |
| 270 | 365801.2 | 1581451 | 210 | 1205 |
| 271 | 1449816.11 | 3598343 | 1 | 535 |

[0208] TABLE 5

| SEQ ID | | | | |
|---|---|---|---|---|
| NO | Template ID | GenBank ID | E-value | Annotation |
| 1 | 1383156.23 | g262770 | 9.00E−47 | type II surfactant protein C, type II SP-C [Oryctolagus cuniculus] |
| 2 | 1097334.8 | g4321787 | 1.00E−12 | 6-pyruvoyl-tetrahydropterin synthase |
| 3 | 1330210.32 | g10439446 | 0 | FLJ22911 fis, clone KAT05860, highly similar to stimulatory regulatory component Gs of adenylyl |
| | | | | cyclase |
| 4 | 1330210.33 | g31914 | 0 | Human mRNA for coupling protein G(s) alpha subunit (alpha-S2) |
| 5 | 978840.1 | g3882333 | 5.00E−82 | KIAA0806 protein |
| 6 | 1850670CB1 | g182606 | 0 | Human factor I (C3b/C4b inactivator) mRNA, complete cds. |
| 7 | 427830.26 | g182967 | 0 | Human GTP-binding protein superfamily, G-protein alpha-olf subunit (olfactory) mRNA, complete |
| | | | | cds. |
| 8 | 002838.45 | g2326174 | 0 | Human selenoprotein W (selW) mRNA, complete cds. |
| 9 | 002838.44 | g2326174 | 0 | Human selenoprotein W (selW) mRNA, complete cds. |
| 10 | 1451265CB1 | g3025445 | 0 | R32184_1 |
| 11 | 347284.6 | g1575562 | 0 | Human hematopoietic progenitor kinase (HPK1) mRNA, complete cds. |
| 12 | 255966.9 | g7020703 | 0 | Human cDNA FLJ20533 fis, clone KAT10931. |
| 13 | 406387.7 | g5689439 | 0 | KIAA1051 protein [Homo sapiens] |
| 14 | 062199.7 | g7320864 | 0 | Human mRNA for putative integral membrane transporter protein (LC27 gene). |
| 15 | 1383059.61 | g186840 | 0 | Human colin carcinoma laminin-binding protein mRNA, complete cds. |
| 16 | 332595.5 | g2979417 | 0 | Human mRNA for PCDH7 (BH-Pcdh)a, complete cds. |
| 17 | 332595.12 | g2979419 | 0 | Human mRNA for PCDH7 (BH-Pcdh)b, complete cds. |
| 18 | 5401223CB1 | g3021700 | 0 | Human BAI3 mRNA, complete cds. |
| 19 | 002838.40 | g2384720 | 0 | Human selenoprotein W (hSelW) mRNA, complete cds. |
| 20 | 378186.30 | g338446 | 0 | Human ribosomal protein S16 mRNA, complete cds. |
| 21 | 348196.83 | g177208 | 0 | Human 4F2 glycosylated heavy chain (4F2HC) antigen gene, exon 1 and 2. |
| 22 | 348196.89 | g1200185 | 0 | Human U22 snoRNA host gene (UHG) gene, complete sequence. |
| 23 | 1136856.23 | g183994 | 0 | Human heregulin-beta1 gene, complete cds. |
| 24 | 1136856.25 | g183998 | 0 | Human heregulin-beta3 gene, complete cds. |
| 25 | 101575.1 | g34328 | 0 | Human mRNA for lactate dehydrogenase B (LDH-B). |
| 26 | 276310.1 | g488074 | 4.00E−57 | Human insulinoma-associated (IA-1) gene, partial cds. |
| 27 | 014284CB1 | g1006656 | 0 | Human mRNA for cathepsin C. |
| 28 | 272599.1 | | | Incyte Unique |
| 29 | 1383712.24 | g292442 | 0 | Human ribosomal protein S20 (RPS2O) mRNA, complete cds. |
| 30 | 1820861CB1 | g2580587 | 0 | Human platelet activating receptor homolog (H963) mRNA, complete cds. |
| 31 | 330902.2 | g2580588 | 0 | platelet activating receptor homolog [Homo sapiens] |
| 32 | 211881.1 | g340088 | 7.00E−15 | Human small nuclear rna pseudogene (clone pul-1) and flanks. |
| 33 | 399161.1 | g36076 | 2.00E−37 | Human gene possibly encoding U1 RNA. |
| 34 | 138206.1 | | | Incyte Unique |
| 35 | 1241528.18 | g388031 | 0 | Human ribosomal protein L11 mRNA, complete cds. |
| 36 | 1091353.11 | g506338 | 5.00E−75 | flavoprotein subunit of complex II [Homo sapiens] |
| 37 | 405058.1 | g30398 | 0 | Human mRNA for D-1 dopamine receptor. |
| 38 | 406573.9 | g10433269 | 3.00E−60 | Human cDNA FLJ11898 fis, clone HEMBA1007322. |
| 39 | 3365683CB1 | g34328 | 0 | Human mRNA for lactate dehydrogenase B (LDH-B). |
| 40 | 406992.1 | g11493651 | 0 | Human calcium channel blocker resistance protein CCBR1 mRNA, complete cds. |
| 41 | 399626.1 | g5668857 | 2.00E−53 | Homo sapiens glutathione transferase A4 gene, exon 1. |
| 42 | 474725.3 | g10440217 | 1.00E−16 | Human cDNA: FLJ23506 fis, clone LNG03055. |
| 43 | 402460.13 | g10438153 | 0 | Human cDNA: FLJ21937 fis, clone HEP04432. |
| 44 | 038033.1 | g6807879 | 0 | Human mRNA; cDNA DKFZp434C0326 (from clone DKFZp434C0326). |
| 45 | 208075.1 | g23914 | 1.00E−117 | Human 7SK45 DNA. |
| 46 | 3479061CB1 | g1103903 | 0 | Human spermidine/spermine N1-acetyltransferase (SSAT) gene, complete cds. |
| 47 | 1454465.1 | g5419854 | 0 | Human mRNA; cDNA DKFZp566N043 (from clone DKFZp566N043). |
| 48 | 378186.29 | g338446 | 0 | Human ribosomal protein S16 mRNA, complete cds. |
| 49 | 330836.4 | g11275977 | 0 | Human NOTCH 2 (N2) mRNA, complete cds. |
| 50 | 330836.5 | g11527996 | 0 | Human NOTCH2 protein (NOTCH2) mRNA, complete cds. |
| 51 | 410882.6 | g1674386 | 0 | diabetes mellitus type I autoantigen |
| 52 | 1405844CB1 | g180925 | 0 | Human CO-029. |
| 53 | 330933.15 | g6330032 | 0 | Human mRNA for KIAA1147 protein, partial cds. |
| 54 | 979182.3 | g424133 | 0 | Human connexin45 gene, complete cds. |
| 55 | 1382838.129 | g189208 | 0 | Human nidogen mRNA, complete cds. |
| 56 | 898864.15 | g11691653 | 7.00E−10 | Human PDX1 gene for lipoyl-containing component X, exons 1-11. |
| 57 | 033527.1 | g10434733 | 3.00E−86 | FLJ12953 fis, clone NT2RP2005490, moderately similar to Mouse D3Mm3e mRNA. |
| 58 | 351122.2 | g183581 | 0 | Human glycoprotein IIIa (ITGB3) gene, exon 15 and partial cds. |
| 59 | 522433CB1 | g1813326 | 0 | Human mRNA for TGF-beta superfamily protein, complete cds. |
| 60 | 081187.1 | g219928 | 1.00E−19 | Human midkine gene, complete cds. |
| 61 | 2462908CB1 | g7861556 | 0 | Human mRNA for SIRP-b2, complete cds. |
| 62 | 350416.3 | g7861556 | 0 | Human mRNA for SIRP-b2, complete cds. |
| 63 | 1061366.15 | | | Incyte Unique |
| 64 | 026200.1 | | | Incyte Unique |
| 65 | 214744.1 | g3978547 | 0 | Human chromosome 3 subtelomeric region. |
| 66 | 214811.1 | g10433865 | 0 | Human cDNA FLJ12399 fis, clone MAMMA1002780. |
| 67 | 107572.1 | | | Incyte Unique |
| 68 | 215003.1 | | | Incyte Unique |
| 69 | 106250.1 | g7768719 | 4.00E−10 | Homo sapiens genomic DNA, chromosome 21q, section 63/105. |
| 70 | 403668.1 | | | Incyte Unique |
| 71 | 011664.1 | g35504 | 0 | Human M gene for M1-type and M2-type pyruvate kinase. |
| 72 | 059849.1 | | | Incyte Unique |
| 73 | 1197030.23 | g36139 | 0 | Human mRNA for ribosomal protein L7. |
| 74 | 042195.1 | | | Incyte Unique |
| 75 | 983907.1 | | | Incyte Unique |
| 76 | 210826.1 | g7768770 | 2.00E−12 | Homo sapiens genomic DNA, chromosome 21q, section 97/105. |
| 77 | 343356.1 | | | Incyte Unique |
| 78 | 1439948.1 | | | Incyte Unique |
| 79 | 984996.3 | | | Incyte Unique |
| 80 | 102564.1 | | | Incyte Unique |
| 81 | 146768.1 | | | Incyte Unique |
| 82 | 340291.1 | g3387951 | 3.00E−10 | Homo sapiens clone 24487 mRNA sequence. |
| 83 | 134460.1 | g5823146 | 3.00E−80 | testis specific protein |
| 84 | 053411.1 | | | Incyte Unique |
| 85 | 1448208.1 | | | Incyte Unique |
| 86 | 070655.1 | g5926700 | 0 | Human genomic DNA, chromosome 6p21.3, HLA Class I region, section 12/20. |
| 87 | 406389.1 | g4150939 | 2.00E−33 | GSG1 [Mus musculus] |
| 88 | 167601.1 | | | Incyte Unique |
| 89 | 341084.1 | | | Incyte Unique |
| 90 | 404224.1 | | | Incyte Unique |
| 91 | 026596.1 | | | Incyte Unique |
| 92 | 1041038.1 | g5042384 | 0 | Human KVLQT1 gene. |
| 93 | 080588.1 | | | Incyte Unique |
| 94 | 014408.2 | | | Incyte Unique |
| 95 | 351752.1 | g10432680 | 0 | Homo sapiens cDNA FLJ11425 fis, clone HEMBA1001051. |
| 96 | 002661.1 | | | Incyte Unique |
| 97 | 399162.11 | g7770237 | 5.00E−11 | PRO2822 [Homo sapiens] |
| 98 | 174086.1 | | | Incyte Unique |
| 99 | 116731.1 | | | Incyte Unique |
| 100 | 1453971.4 | g5106994 | 9.00E−38 | HSPC038 protein [Homo sapiens] |
| 101 | 347635.1 | g11275977 | 0 | Human NOTCH 2 (N2) mRNA, complete cds. |
| 102 | 1401326.2 | g5926687 | 9.00E−09 | Human genomic DNA, chromosome 3p21.3, clone: 603 to 320, anti-oncogene region, section 3/3. |
| 103 | 1330204.51 | g2554613 | 0 | Human mRNA for RGS5, complete cds. |
| 104 | 1327351.31 | g34613 | 0 | Human mRNA for matrix Gla protein. |
| 105 | 1327351.35 | g187590 | 0 | Human matrix Gla protein (MGP) gene, complete cds. |
| 106 | 332723.6 | g10434712 | 0 | Human cDNA FLJ12937 fis, clone NT2RP2005020. |
| 107 | 1184503.1 | g3002924 | 0 | Human T-cell receptor beta chain (TCRBV13S1-TCRBJ2S1) mRNA, complete cds. |
| 108 | 410610.1 | g187590 | 0 | Human matrix Gla protein (MGP) gene, complete cds. |
| 109 | 986073.1 | g180670 | 0 | Human collagenase type IV mRNA, 3’ end. |
| 110 | 1102234.29 | g36760 | 0 | Human mRNA fragment for T-cell receptor beta chain D-J-C (JUR-beta 2). |
| 111 | 1102234.28 | g36760 | 0 | Human mRNA fragment for T-cell receptor beta chain D-J-C (JUR-beta 2). |
| 112 | 029061.1 | | | Incyte Unique |
| 113 | 233180.39 | g7770154 | 0 | Human PRO1873 mRNA, complete cds. |
| 114 | 010317.1 | | | Incyte Unique |
| 115 | 2007614CB1 | g4151118 | 0 | Human fertilin beta mRNA, complete cds. |
| 116 | 065582.1 | | | Incyte Unique |
| 117 | 1188409.1 | g818 | 0 | protein-glutamine gamma-glutamyltransferase [Bos taurus] |
| 118 | 1188409.15 | g53667 | 0 | biglycan (PGI) [Mus musculus] |
| 119 | 1102234.75 | g33543 | 0 | Human mRNA for T-cell receptor V beta gene segment V-beta-6, clone IGRb11. |
| 120 | 403534.6 | g7243180 | 0 | Human mRNA for KIAA1400 protein, partial cds. |
| 121 | 238349.4 | g6624095 | 1.00E−07 | similar to Coch-5B2 |
| 122 | 017058.1 | g8515813 | 0.0004 | RSD-6 |
| 123 | 190188CB1 | g29469 | 0 | Human mRNA for basement membrane heparan sulfate proteoglycan. |
| 124 | 1383106.7 | g10437335 | 0 | Human cDNA: FLJ21267 fis, clone COL01717. |
| 125 | 1510895.1 | g189519 | 5.00E−66 | Human pro-alpha-1 (V) collagen mRNA, complete cds. |
| 126 | 1454873.5 | g339561 | 0 | Human transforming growth factor-beta (tgf-beta) mRNA, complete cds. |
| 127 | 222836.2 | g35685 | 0 | Human testis specific mRNA for protamine 1 (P1). |
| 128 | 3098081CB1 | g3970845 | 0 | Human mRNA for RALDH2-T, complete cds. |
| 129 | 1383398.6 | g1165211 | 0 | Human microfibril-associated glycoprotein-2 MAGP-2 mRNA, complete cds. |
| 130 | 1383398.7 | g1165211 | 0 | Human microfibril-associated glycoprotein-2 MAGP-2 mRNA, complete cds. |
| 131 | 198862.10 | g1907077 | 0 | Human mRNA for Pirin, isolate 17. |
| 132 | 2515360CB1 | g2370201 | 0 | Human mRNA for procollagen alpha 2(V). |
| 133 | 334180.6 | g2224696 | 0 | Human mRNA for KIAA0378 gene, partial cds. |
| 134 | 982535.2 | g2612787 | 0 | Human P2X7 gene, exon 9-11. |
| 135 | 1501794.11 | g7672348 | 0 | Human unknown mRNA. |
| 136 | 983910CB1 | g36760 | 0 | Human mRNA fragment for T-cell receptor beta chain D-J-C (JUR-beta 2). |
| 137 | 999097.1 | g2781413 | 0 | Human clone DT2P1G7 mRNA, CAG repeat region. |
| 138 | 293858.32 | g10439538 | 0 | Human cDNA: FLJ22988 fis, clone KAT11812. |
| 139 | 1269631CB1 | g2654025 | 0 | gp250 precursor [Mus musculus] |
| 140 | 337208.11 | g10439667 | 0 | FLJ23092 fis, clone LNG07245 |
| 141 | 337800.3 | g7959737 | 1.00E−177 | PRO1037 [Homo sapiens] |
| 142 | 1361343CB1 | g3882220 | 0 | Human mRNA for KIAA0750 protein, complete cds. |
| 143 | 1504867.1 | g10436845 | 0 | Human cDNA: FLJ20887 fis, clone ADKA03276. |
| 144 | 410917.13 | g506431 | 0 | lysosomal acid lipase [Homo sapiens] |
| 145 | 2080904CB1 | g10437138 | 0 | Human cDNA: FLJ21110 fis, clone CAS05377. |
| 146 | 2520680CB1 | g2058395 | 0 | Human adenovirus protein E3-14.7 k interacting protein 1 (FIP-1) mRNA, complete cds. |
| 147 | 1274560.12 | g36748 | 0 | Human mRNA for T-cell specific protein. |
| 148 | 313149.1 | g10435386 | 0 | FLJ13386 fis, clone PLACE1001104, weakly similar to MYOSIN HEAVY CHAIN, |
| | | | | NON-MUSCLE. |
| 149 | 268514.25 | g1552523 | 0 | Human ionotropic ATP receptor P2X5b mRNA, complete cds. |
| 150 | 2100016CB1 | g2565275 | 4.00E−48 | Dim1p homolog [Homo sapiens] |
| 151 | 2906265CB1 | g338928 | 0 | Human T-cell receptor active beta-chain V-D-J-beta-1.2-C-beta-1 (TCRB) mRNA, partial cds. |
| 152 | 189155.2 | g5931525 | 3.00E−12 | Human genomic DNA, chromosome 22q11.2, Cat Eye Syndrome region |
| 153 | 336733.9 | g6049603 | 0 | Human dickkopf-1 (DKK-1) mRNA, complete cds. |
| 154 | 1273136.1 | g9956031 | 0 | Human clone CDABP0045 mRNA sequence. |
| 155 | 253888.1 | g6682959 | 0 | nuclear receptor binding factor-2 |
| 156 | 407570.3 | g11907922 | 0 | Human enhancer of polycomb mRNA, complete cds. |
| 157 | 977136.8 | g1314305 | 0 | Human channel-like integral membrane protein (AQP-1) mRNA, clone AQP-1-2344, partial cds. |
| 158 | 977136.1 | g1314305 | 0 | Human channel-like integral membrane protein (AQP-1) mRNA, clone AQP-1-2344, partial cds. |
| 159 | 1500085.3 | g5410279 | 0 | Human HSPCO34 protein mRNA, complete cds. |
| 160 | 1439712.1 | g10434784 | 0 | FLJ12987 fis, clone NT2RP3000068, weakly similar to SON OF SEVENLESS PROTEIN |
| | | | | HOMOLOG 1. |
| 161 | 015508.1 | g7243180 | 0 | Human mRNA for KIAA1400 protein, partial cds. |
| 162 | 111552CB1 | g10439538 | 0 | Human cDNA: FLJ22988 fis, clone KAT11812. |
| 163 | 1641902CB1 | g6093424 | 0 | Human connexin 37 (GJA4) mRNA, complete cds. |
| 164 | 252999.1 | g10047170 | 0 | Human mRNA for KIAA1553 protein, partial cds. |
| 165 | 977391.15 | g7019914 | 0 | Human cDNA FLJ20061 fis, clone COL01383. |
| 166 | 1363208CB1 | g3283351 | 0 | Human lens epithelium-derived growth factor mRNA, complete cds. |
| 167 | 002776CB1 | g5868895 | 0 | Human BAG-family molecular chaperone regulator-4 mRNA, complete cds. |
| 168 | 140557.23 | g7020279 | 0 | Human cDNA FLJ20287 fis, clone HEP04390. |
| 169 | 140557.22 | g3925386 | 0 | Human inversin protein mRNA, complete cds. |
| 170 | 1286746CB1 | g35439 | 0 | Human mRNA for protein gene product (PGP) 9.5. |
| 171 | 1102234.13 | g36172 | 0 | Human rearranged T-cell receptor beta chain mRNA. |
| 172 | 1401226.4 | g7768753 | 3.00E−12 | Homo sapiens genomic DNA, chromosome 21q, section 95/105. |
| 173 | 331677.2 | g190220 | 0 | protein phosphatase 2A 130 kDa regulatory subunit [Homo sapiens] |
| 174 | 234870.4 | g11320875 | 3.00E−79 | cdk-binding protein |
| 175 | 346051.5 | g532677 | 0 | Human mRNA for ribonuclease A (RNase A), complete cds. |
| 176 | 232055.1 | | | Incyte Unique |
| 177 | 070248.106 | g7959920 | 0 | Human PRO2646 mRNA, complete cds. |
| 178 | 028253.6 | g4096056 | 8.00E−84 | R28379_1 |
| 179 | 989381.1 | g183655 | 0 | Human glutathione S-transferase mRNA, complete cds. |
| 180 | 984009.1 | g863029 | 0 | Human high-mobility group phosphoprotein isoform I-C (HMGIC) gene, exon 5. |
| 181 | 404758.7 | g7684246 | 0 | Human mRNA for organic anion transporter OATP-D, complete cds. |
| 182 | 208350.1 | g10434511 | 0 | Homo sapiens cDNA FLJ12807 fis, clone NT2RP2002316. |
| 183 | 334193.1 | | | Incyte Unique |
| 184 | 335046.8 | g940201 | 0 | Human clone LS637A M73 hypoxanthine phosphoribosyltransferase (hprt) deletion mutant mRNA, |
| | | | | partial cd |
| 185 | 198947.2 | g10435130 | 0 | Human cDNA FLJ13209 fis, clone NT2RP4000424. |
| 186 | 014669.1 | | | Incyte Unique |
| 187 | 2951807CB1 | g4589683 | 0 | Human mRNA for KIAA1017 protein, complete cds. |
| 188 | 482452.13 | g180055 | 0 | Human thymocyte antigen CD1b mRNA, complete cds. |
| 189 | 2513610CB1 | g2088550 | 0 | Human hereditary haemochromatosis region |
| 190 | 1376812.4 | g339840 | 0 | Human triosephosphate isomerase mRNA, complete cds. |
| 191 | 1446355.3 | g8919392 | 0 | Human mRNA full length insert cDNA clone EUROIMAGE 781354. |
| 192 | 1446355.2 | g8919392 | 0 | Human mRNA full length insert cDNA clone EUROIMAGE 781354. |
| 193 | 365121.1 | g10439528 | 0 | FLJ22979 fis, clone KAT11379, highly similar to HUMTUBAK Human alpha-tubulin mRNA. |
| 194 | 1399068.1 | g23925 | 2.00E−41 | Human mRNA for 7SL RNA pseudogene. |
| 195 | 474395.1 | g496886 | 8.00E−60 | Human mRNA for beta tubulin, clone nuk_278. |
| 196 | 001300.10 | g6457274 | 7.00E−12 | putative E1-E2 ATPase |
| 197 | 482193.2 | g5926699 | 2.00E−86 | Human genomic DNA, chromosome 6p21.3, HLA Class I region, section 11/20. |
| 198 | 450887.1 | g7629994 | 4.00E−33 | 60S RIBOSOMAL PROTEIN L36 homolog |
| 199 | 1281959CB1 | g1805279 | 0 | Human alpha II spectrin mRNA, complete cds. |
| 200 | 197856.4 | g3947687 | 0 | Human mRNA for Sec24 protein (Sec24A isoform), partial. |
| 201 | 197856.9 | g6807899 | 0 | Human mRNA; cDNA DKFZp434C1526 (from clone DKFZp434C1526). |
| 202 | 1088680.3 | g10434855 | 0 | Human cDNA FLJ13032 fis, clone NT2RP3001120, moderately similar to ZINC FINGER |
| | | | | PROTEIN 136. |
| 203 | 246020.6 | g5689566 | 0 | Human mRNA for KIAA1115 protein, complete cds. |
| 204 | 1446842.1 | g7293054 | 3.00E−26 | Top1 gene product |
| 205 | 2580580CB1 | g9957753 | 0 | Human kidney-specific membrane protein NX-17 mRNA, complete cds. |
| 206 | 1503093.1 | g207500 | 4.00E−07 | alpha-tropomyosin 2 [Rattus norvegicus] |
| 207 | 338662.1 | g804810 | 1.00E−08 | unknown protein [Rattus norvegicus] |
| 208 | 324037.1 | g5689412 | 0 | Human mRNA for KIAA1038 protein, partial cds. |
| 209 | 989010.3 | g34513 | 0 | Human mRNA for monocyte chemoattractant protein 1 (MCP-1). |
| 210 | 470784CB1 | g240867 | 0 | monocyte chemoattractant protein-1 [Human, mRNA, 739 nt]. |
| 211 | 989010.5 | g240867 | 0 | monocyte chemoattractant protein-1 [Human, mRNA, 739 nt]. |
| 212 | 473040.1 | g10442025 | 0 | seladin-1 [Homo sapiens] |
| 213 | 400203.1 | g4836418 | 0 | Human endothelial lipase mRNA, complete cds. |
| 214 | 474437.17 | g339972 | 0 | Human TRPM-2 mRNA, complete cds. |
| 215 | 1345561CB1 | g1698395 | 0 | Human lanosterol 14-demethylase cytochrome P450 (CYP51) mRNA, complete cds. |
| 216 | 1513913CB1 | g1665722 | 0 | Human mRNA for RPD3 protein, complete cds. |
| 217 | 1453827.5 | g1350551 | 0 | Human mRNA for ceramide glucosyltransferase, complete cds. |
| 218 | 199471.2 | g2463195 | 0 | Human mRNA for MAD2 protein. |
| 219 | 000278CB1 | g435676 | 0 | Human mRNA for squalene synthase. |
| 220 | 233942.1 | g11934947 | 0 | Human neuropilin 2 (NRP2) gene, complete cds, alternatively spliced. |
| 221 | 1136923.19 | g178535 | 0 | Human aminopeptidase N/CD13 mRNA encoding aminopeptidase N, complete cds. |
| 222 | 1136923.18 | g178535 | 0 | Human aminopeptidase N/CD13 mRNA encoding aminopeptidase N, complete cds. |
| 223 | 3658034CB1 | g3881654 | 2.00E−50 | similarity to Pfam domain: PF00207 (Alpha-2-macroglobulin family), Score = 377.3, |
| | | | | E-value = 1.1e−113, N = 1 |
| 224 | 1450005.5 | g7271464 | 0 | Human soluble neuropilin-1 mRNA, |
| | | | | complete cds. |
| 225 | 1450005.6 | g2978559 | 0 | Human vascular endothelial cell growth factor 165 receptor/neuropilin (VEGF165) mRNA, |
| | | | | complete cds. |
| 226 | 464689.64 | g7415720 | 0 | Human Scd mRNA for stearoyl-CoA desaturase, complete cds. |
| 227 | 334388.7 | g285944 | 0 | Human mRNA for KIAA0104 gene, complete cds. |
| 228 | 994660.1 | g2326205 | 0 | Human Rac3 (RAC3) mRNA, complete cds. |
| 229 | 3147649CB1 | g6006514 | 0 | Human mRNA for SAP 130 spliceosomal protein. |
| 230 | 2652949CB1 | g1827451 | 0 | Human mRNA for VRK2, complete cds. |
| 231 | 350300.25 | g3600027 | 0 | Human dysferlin mRNA, complete cds. |
| 232 | 1273213CB1 | g34458 | 0 | Human DNA for monoamine oxidase type A (14) (partial). |
| 233 | 222242.35 | g2228774 | 0 | Human paraoxonase (PON2) mRNA, complete cds. |
| 234 | 621792CB1 | g10439430 | 0 | FLJ22896 fis, clone KAT04996 |
| 235 | 148820CB1 | g3417295 | 0 | KIAA0220 [Homo sapiens] |
| 236 | 1812221CB1 | g307382 | 0 | Human RNA helicase A mRNA, complete cds. |
| 237 | 1504168.4 | g403455 | 0 | Human 26S protease (S4) regulatory subunit mRNA, complete cds. |
| 238 | 109925.11 | g188542 | 0 | Human MIC2 mRNA, complete cds. |
| 239 | 1073168.8 | g5689450 | 0 | Human mRNA for KIAA1057 protein, partial cds. |
| 240 | 2239072CB1 | g2696053 | 0 | Human ADDL mRNA for adducin-like protein, complete cds. |
| 241 | 4767318CB1 | g7299015 | 0 | CG9615 gene product |
| 242 | 1339068CB1 | g33943 | 0 | Human mRNA for integrin alpha 6. |
| 243 | 2966620CB1 | g339972 | 0 | Human TRPM-2 mRNA, complete cds. |
| 244 | 1347119.1 | g2370125 | 0 | Human mRNA for ZNF185 gene. |
| 245 | 816792CB1 | g11934948 | 0 | neuropilin-2a(17) [Homo sapiens] |
| 246 | 1092427.6 | g339547 | 0 | Human transforming growth factor-beta 1 binding protein mRNA, complete cds. |
| 247 | 251793.1 | g5852061 | 0 | Human partial mRNA for Claudin-11 protein (CLDN11 gene). |
| 248 | 1622869CB1 | g3283414 | 0 | Human oligodendrocyte-specific protein (OSP) mRNA, complete cds. |
| 249 | 2581158CB1 | g35070 | 0 | Human mRNA for NAD-dependent methylene tetrahydrofolate dehydrogenase cyclohydrolase |
| | | | | (EC 1.5.1.15). |
| 250 | 2174441CB1 | g2257932 | 0 | Human angiopoietin-2 mRNA, complete cds. |
| 251 | 235191.3 | g6706799 | 6.00E−46 | dJ447F3.2 (ubiquitin-conjugating enzyme E2 H10) [Homo sapiens] |
| 252 | 235191.4 | g2062372 | 0 | Human cyclin-selective ubiquitin carrier protein mRNA, complete cds. |
| 253 | 1867417CB1 | g292829 | 0 | Human DNA topoisomerase II (top2) mRNA, complete cds. |
| 254 | 1285632CB1 | g3342264 | 0 | Na-K-Cl cotransporter [Rattus norvegicus] |
| 255 | 336992.5 | g339805 | 0 | Human topoisomerase I mRNA, complete cds. |
| 256 | 1909266CB1 | g184564 | 0 | Human transformation-sensitive protein (IEF SSP 3521) mRNA, complete cds. |
| 257 | 1214953.16 | g190126 | 0 | Human mitochondrial matrix protein P1 (nuclear encoded) mRNA, complete cds. |
| 258 | 1850092CB1 | g339679 | 0 | Human threonyl-tRNA synthetase mRNA, complete cds. |
| 259 | 1555752CB1 | g2992633 | 0 | Human protein kinase mRNA, complete cds. |
| 260 | 441283.5 | g29864 | 0 | Human CENP-E mRNA. |
| 261 | 4349106CB1 | g10439047 | 0 | FLJ22600 fis, clone HSI04447, highly similar to zinc finger transcription factor GKLF mRNA. |
| 262 | 2700132CB1 | g415818 | 0 | Human mki67a mRNA (long type) for antigen of monoclonal antibody Ki-67. |
| 263 | 441283.4 | g29864 | 0 | Human CENP-E mRNA. |
| 264 | 2613976CB1 | g603954 | 0 | Human mRNA for KIAA0098 protein, partial cds. |
| 265 | 337894.8 | g8489880 | 0 | Human actin binding protein anillin mRNA, complete cds. |
| 266 | 1452351.17 | g5809677 | 0 | Human sperm membrane protein BS-63 mRNA, complete cds. |
| 267 | 1754695CB1 | g35564 | 0 | Human mRNA for purine nucleoside phosphorylase (PNP; EC 2.4.2.1). |
| 268 | 232888.4 | g292829 | 0 | Human DNA topoisomerase II (top2) mRNA, complete cds. |
| 269 | 247817.4 | g2655411 | 0 | Human KDR/flk-1 protein mRNA, complete cds. |
| 270 | 365801.2 | g32368 | 0 | Human Hox1.8 gene for homeobox protein. |
| 271 | 1449816.11 | g1203968 | 0 | Human chromosome X region from filamin (FLN) gene to glucose-6-phosphate dehydrogenase |
| | | | | (G6PD) gene |

The application's sequence listing, which the Patent Office published only in electronic form, follows.

SEQUENCE LISTING (271 sequences)

SEQ ID NO: 1 - DNA, 698 bp, Homo sapiens
  misc_feature: Incyte ID No: 1383156.23
gcaagatggatgtgggcagcaaagaggtcctgataggagagcccgccggactactccgcagctccccggggccgatttggcattccctgctgcccagtgcacctgaaacgccttcttatcgtggtggtggtggtggtcctcatcgtcgtggtgattgtgggagccctgctcatgggtctccacatgagccagaaacacacggagatggttctggagatgagcattggggcgccggaagcccagcaacgcctggccctgagtgagcacctggttaccactgccaccttctccatcggctccactggcctcgtggtgtatgactaccagcagctgctgatcgcgtacgtctaagctgggccaggcagaggggcgagatgcaggctcagcaccctccggaggggacccggccttcctgggcatggccgtgagcaccctgtgtggcgaggtgccgctctactacatctaggacgcctccggtgagcagggtcagtggaagccccaacgggaaaggaaacgccccgggcaaagggtcttttgcagcttttgcagacgggcaagaagctgcttctgcccacaccgcagggacaagccctggagaaatgggagcttggcgagaggatgggagtgggcagaggtggcgcccaggggcccgggaactcctgccacaacagaataaagcagcctgattgacaagcaaa

SEQ ID NO: 2 - DNA, 940 bp, Homo sapiens
  misc_feature: Incyte ID No: 1097334.8
ttcggctcgaggtggtgggctggtcttgcttctgcagtttaagggggatccctgcgccgagatgtctggctaagtggtcgttgtaacaagtggcagagatggtgaaaacatcagggagcaggtggtggctgttccagtttcttatctcaggagggaagagctgcagatgtctttactgtgaatgagggagagaaacgctaaagcacagaaatgttcagaaccaaagagctggatcactcatgcttctagaaaagacattggcatcttctcattgctcatctactgtgcctggcacagccttattttctagctttctgaatgtgagttccatccatatcctttgcataacggtggtactgggctgtggagagcttggaatgtgtgtccatggggaaatgggctgttctggttattataaaacggccaagggagggctccatggcacacctctgagtaacccaggacactcctgtttgggaaatgcaaaccatccatacggcaggggcacaattataaagattgatcctgtcacgggaatggtttcaaatctgaccaacctcatggcatacattggggaagcaattgtgaaaccccttgattctttggatctggacatgctgtactgtgacaatggtttgtgtgtgacagaaaatgtagctgtgtctaccgggaaagactggggaaatttcttcctgtggagttctttataaagcaaaagtgcatgaaactgtcagtaatattgtagtctataaagggaaattgctcttagaggctaatattgcacaatgactactttttttgcttatttggaaaagatctttatctcttggagtattaagaagtcaacatataattgccaccctatacattgtgttctggagtgcctgatttattgaaatcagtgtgaaacctattttaaataaatatctatttcaaaacc

SEQ ID NO: 3 - DNA, 521 bp, Homo sapiens
  misc_feature: Incyte ID No: 1330210.32
ggcgattgaagtacgtgctggctccttgtgctgtctgtcttgtagcgccctcccagccagtgctgttccctgaccgctttgctaaatcattttcagaccattgtggccgccatgagcaacctggtgccccccgtggagctggccaaccccgagaaccagttcagagtggactacattctgagtgtgatgaacgtgcctgactttgacttccctcccgaattctatgagcatgccaaggctctgtgggaggatgaaggagtgcgtgcctgctacgaacgctccaacgagtaccagctgattgactgtgcccagtacttcctggacaagatcgacgtgatcaagcaggctgactatgtgccgagcgatcaggacctgcttcgctgccgtgtcctgacttctggaatctttgagaccaagttccaggtggacaaagtcaacttccacatgtttgacgtgggtggccagcgcgatgaacgccgcaagtggatccagtgcttcaacgatgtgactggcatcatctt

SEQ ID NO: 4 - DNA, 1645 bp, Homo sapiens
  misc_feature: Incyte ID No: 1330210.33
aggactgctgtgattaggacggatcagacctttccaggaaaggcggcgcggcggcagcagctcccgcagctcctgctctggtccgccgccgccatgggctgcctcgggaacagtaagaccgaggaccagcgcaacgaggagaaggcgcagcgtgaggccaacaaaaagatcgagaagcagctgcagaaggacaagcaggtctaccgggccacgcaccgcctgctgctgctgggtgctggagaatctggtaaaagcaccattgtgaagcagatgaggatcctgcatgttaatgggtttaatggagagggcggcgaagaggacccgcaggctgcaaggagcaacagcgatggcagtgagaaggcaaccaaagtgcaggacatcaaaaacaacctgaaagaggcgattgaaaccattgtggccgccatgagcaacctggtgccccccgtggagctggccaaccccgagaaccagttcagagtggactacatcctgagtgtgatgaacgtgcctgactttgacttccctcccgaattctatgagcatgccaaggctctgtgggaggatgaaggagtgcgtgcctgctacgaacgctccaacgagtaccagctgattgactgtgcccagtacttcctggacaagatcgacgtgatcaagcaggctgactatgtgccgagcgatcaggacctgcttcgctgccgtgtcctgacttctggaatctttgagaccaagttccaggtggacaaagtcaacttccacatgtttgacgtgggtggccagcgcgatgaacgccgcaagtggatccagtgcttcaacgatgtgactgccatcatcttcgtggtggccagcagcagctacaacatggtcatccgggaggacaaccagaccaaccgcctgcaggaggctctgaacctcttcaagagcatctggaacaacagatggctgcgcaccatctctgtgatcctgttcctcaacaagcaagatctgctcgctgagaaagtccttgctgggaaatcgaagattgaggactactttccagaatttgctcgctacactactcctgaggatgctactcccgagcccggagaggacccacgcgtgacccgggccaagtacttcattcgagatgagtttctgaggatcagcactgccagtggagatgggcgtcactactgctaccctcatttcacctgcgctgtggacactgagaacatccgccgtgtgttcaacgactgccgtgacatcattcagcgcatgcaccttcgtcagtacgagctgctctaagaagggaacccccaaatttaattaaagccttaagcacaattaattaaaagtgaaacgtaattgtacaagcagttaatcacccaccatagggcatgattaacaaagcaacctttcccttcccccgagtgattttgcgaaacccccttttcccttcagcttgcttagatgttccaaatttagaaagcttaaggcggcctacagaaaaaggaaaaaaggccacaaaagttccctctcactttcagtaaaaataaataaaacagcagcagcaaacaaataaaatgaaataaaagaaacaaatgaaataaatattgtgttgtgcagcattaaaaaaaatcaaaataaaaattaaatgtgagcaaagaaa

SEQ ID NO: 5 - DNA, 1784 bp, Homo sapiens
  misc_feature: Incyte ID No: 978840.1
gaagatagaggacattggggtatacagctgcacagctcagaacagtgcaggaagtatttcagcaaatgcaactctgactgtcctagaaacaccatcatttttgcggccactgttggaccgaactgtaaccaagggagaaacagccgtcctacagtgcattgctggaggaagccctccccctaaactgaactggaccaaagatgatagcccattggtggtaaccgagaggcacttttttgcagcaggcaatcagcttctgattattgtggactcagatgtcagtgatgctgggaaatacacatgtgagatgtctaacacccttggcactgagagaggaaacgtgcgcctcagtgtgatccccactccaacctgcgactcccctcagatgacagccccatcgttagacgatgacggatgggccactgtgggtgtcgtgatcatagccgtggtttgctgtgtggtgggcacgtcactcgtgtgggtggtcatcatataccacacaaggcggaggaatgaagattgcagcattaccaacacagatgagaccaacttgccagcagatattcctagttatttgtcatctcagggaacgttagctgacaggcaggatgggtacgtgtcttcagaaagtggaagccaccaccagtttgtcacatcttcaggtgctggatttttcttaccacaacatgacagtagtgggacctgccatattgacaatagcagtgaagctgatgtggaagctgccacagatctgttcctttgtccgtttttgggatccacaggccctatgtatttgaagggaaatgtgtatggctcagatccttttgaaacatatcatacaggttgcagtcctgacccaagaacagttttaatggaccactatgagcccagttacataaagaaaaaggagtgctacccatgttctcatccttcagaagaatcctgcgaacggagcttcagtaatatatcgtggccttcacatgtgaggaagctacttaacactagttactctcacaatgaaggacctggaatgaaaaatctgtgtctaaacaagtcctctttagattttagtgcaaatccagagccagcgtcggttgcctcgagtaattctttcatgggtacctttggaaaagctctcaggagacctcacctagatgcctattcaagctttggacagccatcagattgtcagccaagagccttttatttgaaagctcattcttccccagacttggactctgggtcagaggaagatgggaaagaaaggacagattttcaggaagaaaatcacatttgtacctttaaacagactttagaaaactacaggactccaaattttcagtcttatgacttggacacatagactgaatgagaccaaaggaaaagcttaacatactacctcaagtgaacttttatttaaaagagagagaatcttatgttttttaaatggagttatgaattttaaaaggataaaaatgctttatttatacagatgaaccaaaattacaaaaagttatgaaaatttttatactgggaatgatgctcatataagaatacctttttaaactattttttaactttgttttatgcaaaaaagtatcttacgtaaattaatgatataaatcatgattattttatgtatttttataatgccagatttctttttatggaaaatgagttactaaagcattttaaataatacctgccttgtaccattttttaaatagaagttacttcattatattttgcacattatatttaataaaatgtgtcaatttgatgcc

SEQ ID NO: 6 - DNA, 2095 bp, Homo sapiens
  misc_feature: Incyte ID No: 1850670cB1
  unsure 16: a, t, c, g, or other
gttcaaaagtacaaangctctttaggaggtttgttcttttgaaacattttttcagaggttaaaaattaaatttcaaaagaatacctggagtggaaaagagttctcagcagagacaaagaccccgaacacctccaacatgaagcttcttcatgttttcctgttatttctgtgcttccacttaaggttttgcaaggtcacttatacatctcaagaggatctggtggagaaaaagtgcttagcaaaaaaatatactcacctctcctgcgataaagtcttctgccagccatggcagagatgcattgagggcacctgtgtttgtaaactaccgtatcagtgcccaaagaatggcactgcagtgtgtgcaactaacaggagaagcttcccaacatactgtcaacaaaagagtttggaatgtcttcatccagggacaaagtttttaaataacggaacatgcacagccgaaggaaagtttagtgtttccttgaagcatggaaatacagattcagagggaatagttgaagtaaaacttgtggaccaagataagacaatgttcatatgcaaaagcagctggagcatgagggaagccaacgtggcctgccttgaccttgggtttcaacaaggtgctgatactcaaagaaggtttaagttgtctgatctctctataaattccactgaatgtctacatgtgcattgccgaggattagagaccagtttggctgaatgtacttttactaagagaagaactatgggttaccaggatttcgctgatgtggtttgttatacacagaaagcagattctccaatggatgacttctttcagtgtgtgaatgggaaatacatttctcagatgaaagcctgtgatggtatcaatgattgtggagaccaaagtgatgaactgtgttgtaaagcatgccaaggcaaaggcttccattgcaaatcgggtgtttgcattccaagccagtatcaatgcaatggtgaggtggactgcattacaggggaagatgaagttggctgtgcaggctttgcatctgtggctcaagaagaaacagaaattttgactgctgacatggatgcagaaagaagacggataaaatcattattacctaaactatcttgtggagttaaaaacagaatgcacattcgaaggaaacgaattgtgggaggaaagcgagcacaactgggagacctcccatggcaggtggcaattaaggatgccagtggaatcacctgtgggggaatttatattggtggctgttggattctgactgctgcacattgtctcagagccagtaaaactcatcgttaccaaatatggacaacagtagtagactggatacaccccgaccttaaacgtatagtaattgaatacgtggatagaattattttccatgaaaactacaatgcaggcacttaccaaaatgacatcgctttgattgaaatgaaaaaagacggaaacaaaaaagattgtgagctgcctcgttccatccctgcctgtgtcccctggtctccttacctattccaacctaatgatacatgcatcgtttctggctggggacgagaaaaagataacgaaagagtcttttcacttcagtggggtgaagttaaactaataagcaactgctctaagttttacggaaatcgtttctatgaaaaagaaatggaatgtgcaggtacatatgatggttccatcgatgcctgtaaaggggactctggaggccccttagtctgtatggatgccaacaatgtgacttatgtctggggtgttgtgagttggggggaaaactgtggaaaaccagagttcccaggtgtttacaccaaagtggccaattattttgactggattagctaccatgtaggaaggccttttatttctcagtacaatgtataaaattgtgatctctctcttcattctattctttttctctcaagagttccatttaatggaaataaaacggtataattaataattctctaggggggaaaaatgaagcaaatctcattggatatttttaaaggtctccacagagtttatgccatattggaattttgttgtataattctcaaataaatattttggtgaagcataaaaaaaaaa

SEQ ID NO: 7 - DNA, 1264 bp, Homo sapiens
  misc_feature: Incyte ID No: 427830.26
acagaggtagccagaggcttggtggtcgacacagaacgggacagacggcagcgagatggaactagagactctgcctcctaccatggcatggggctggcagtcaggcagtccggggcgccgctccgtcgcagggtggcggcagcatcctcacaagagctcatactgcttgaggtgcatccgctggatgatgtcgcggcagtcgttgaacaccctgcggatgttctctgtgtccacggcgcaggtgaagtgcgggtagcagtaatgtttgccgtcaccggtggccgtgctgatcctcaaaaacaggtcccggataaagaacttggctcttgtaactttgggatcttctcctgcatctggtgttgcgtcttcaggaacagtataatttgcatattctgggaaatagtcttcaatttttgatttccctgccaagactttttctgccagcatatcttgtttgttcaagaacaagatgatagaaatggtccgtaaccacctgttgttccagatgctttcaaaaagatccagggactctctcagcctgttggtgttgttatcttctcgaatcaccatgttgtagctactgcaggctgcgacgtaaatgatagctgtgacatcgttaaagcactggatccattttctcctctcatccctctggccaccaacatcaaacatgtggaagtttactttgtccacttggaatcgtgtctcaaaaatcccagatgtcagaactctgcatctgaggaggtcctggtctgtgggtgtgtagtcaaccaagctgacgctgtcgattctttccaggaagtattgtgcacagtcaatcagctggtattcgttggatctctcaaagcatgccttcacgccttcatcgtcccaaagttttttcacatggtcaaagaattcctgggaatattcaaagtcagtgataggggctatgctcttgatgtagtctgatcgaaattggttttcagggttggccagcggaactggaggtattatagtactcattgctgaaacaattgtcacgatagcatctttaacatttttccggatgtccagaattttctgtttcttttcctcgggattaaacccattgacgtgcaggatcctcatctgtttgacgatagtgcttttcccagactcaccagccccgagcagcaggagccggtgcgtctgcttgcaggtcgcgcttctggtcgcgcagcatgcggtcgatgccccggtcactttcctcgctccttgacggctcgcgcccttggccgctcgc

SEQ ID NO: 8 - DNA, 822 bp, Homo sapiens
  misc_feature: Incyte ID No: 002838.45
gttctagatcgcgatctagaactaggaggctccatcctttctgcgcaggttcccgccgcactcgcgcagacctagcgcgtccaggtgggaggttagtgtggcccgggcgtccgctcctcagcggatgtggcagccccgagccatggctctcgccgtccgagtcgtttattgtggcgcttgaggctacaagtccaagtatcttcagctcaagaagaagttagaagatgagttccccggccgcctggacatctgcggcgagggaactccccaggccaccgggttctttgaagtgatggtagccgggaagttgattcactctaagaagaaaggcgatggctacgtggacacagaaagcaagtttctgaagttggtggccgccatcaaagccgccttggctcagggctaatgcgccctgaaggcagagtccagggaccttgacccagcccctctcagcagacgcttcatgataggaaggactgaaaagtcttgtggacacctggtctttccctgatgttctcgtggctgctgttgggggcagagattgacgcccccggtctttgcctctgagcgggagagtctgtgtgtatgtgtcttccccggaatccacaccaccccaccctcctcctgtcccgtggtttcatcatatctctttgcataccccatgtcttccccagttgtcccctggagtttggggggacatcccgcctcaggcatccttctcaaggggaagccaagagaggcatcaggatgggtgggtttctgattgtggcaacgtttgcaaccgttcacgattcaataaatattggatgaatttaactgaaa

SEQ ID NO: 9 - DNA, 930 bp, Homo sapiens
  misc_feature: Incyte ID No: 002838.44
ccaacaggaggatgggaaggagacttgtgtgggggcctcgggctggcgggtcgcgggttccttatcctccgccttggcgcctctccgcccaccgcccaccgcccctccctggcattggttggcgccaggggaagccgaggctccatcctttctgcgcaggttcccgccgcactcgcgcagacctagcgcgtccaggtgggaggttagtgtggcccgggcgtccgctcctcagcggatgtggcagccccgagccatggctctcgccgtccgagtcgtttattgtggcgcttgaggctacaagtccaagtatcttcagctcaagaagaagttagaagatgagttccccggccgcctggacatctgcggcgagggaactccccaggccaccgggttctttgaagtgatggtagccgggaagttgattcactctaagaagaaaggcgatggctacgtggacacagaaagcaagtttctgaagttggtggccgccatcaaagccgccttggctcagggctaatgcgccctgaaggcagagtccagggaccttgacccagcccctctcagcagacgcttcatgataggaaggactgaaaagtcttgtggacacctggtctttccctgatgttctcgtggctgctgttgggggcagagattgacgcccccggtctttgcctctgagcgggagagtctgtgtgtatgtgtcttccccggaatccacaccaccccaccctcctcctgtcccgtggtttcatcatatctctttgcataccccatgtcttccccagttgtcccctggagtttggggggacatcccgcctcaggcatccttctcaaggggaagccaagagaggcatcaggatgggtgggtttctgattgtggcaacgtttgcaaccgttcacgattcaataaatattggatgaatttaaccg

SEQ ID NO: 10 - DNA, 1512 bp, Homo sapiens
  misc_feature: Incyte ID No: 1451265cB1
gcccatggaggtggccgtgtgtacggactcggcggccccgatgtggagctgcatcgtgtgggaacttcactcgggcgccaacctgctcacctaccgcggcggccaggcgggaccccgcggcctggcgctgctcaatggcgagtatctgctggcggcgcagctgggcaagaattacatcagcgcctgggagctccagcggaaggaccagctccagcagaagatcatgtgccccgggcctgtcacctgtctgactgcatcacccaatggtctctacgtcctggcaggagttgcagaaagcatccacctgtgggaggtctccaccgggaaccttctggtcatcctgagtcgacactaccaggacgtctcctgccttcagttcacaggggacagcagccacttcatctcagggggcaaggactgcctggtgctggtttggagcctctgcagcgtgctgcaggccgacccctccaggattccggcgcccaggcacgtctggtctcaccacacgctccccatcacggacctgcactgcggctttgggggccccctggcccgggtggccacctcctcactggaccagacggtgaagctatgggaggtctcctcgggggagctgctgctctccgtcctctttgacgtgtccatcatggcagtgaccatggacctggctgagcaccatatgttctgcgggggcagtgagggctccatcttccaggtcgacctcttcacctggcccggacagagggagaggagcttccacccagagcaggacgccgggaaggtcttcaaagggcacaggaaccaggtgacttgcctgtcagtgtccactgacggcagcgtgctgctctcaggctcccacgacgagaccgtgcgcctctgggacgtgcagagcaagcagtgcatccggacggtggccctcaaaggcccagtcaccaatgccgccatcctgctggcgcccgtcagcatgctgagctcagacttcaggcccagcctgccgctgccccacttcaacaagcacctgctgggcgccgagcacggggacgagccgcgccacgggggcctcactctgcgcctgggcctccaccagcagggctcggagcccagctacctggaccgcacggagcagctgcaggccgtcctgtgcagcaccatggagaagagcgtgctcggcggccaggaccagctgcgcgtccgtgtgacggagctggaggacgaggtgcgcaacctgcgcaagatcaatcgggacctgttcgacttctccacgcgcttcatcacgcggccggccaagtgaggcccggagaccccggcccgaggcgcccaggcctgagccccatgcctcccagcaaccagggcccgcgggtgtggcccccaccagcccaggcctggactctcctcagttctgtgtcgtgttcgggtttttcctctgtgactgggccgtcttggtgtctcgtggcacgcgtcacagtggtgctagtctgtttttaacaaaagaggatgaaaaaaaaaaaaaaa

SEQ ID NO: 11 - DNA, 2784 bp, Homo sapiens
  misc_feature: Incyte ID No: 347284.6
cagagcccaggggacaggggggtggagcccgttgcacagtcgtgcagtgcagctggggcaggaagcgagagtcaggaggggggaggccacagcccgcggaggcaaggcgggtgcagggcttctggggacggagggaggtgccagaagttgagccctgaggccctgctggcccctgggcgcaggcccagctcaggcccccagggatggacgtcgtggaccctgacattttcaatagagacccccgggaccactatgacctgctacagcggctgggtggcggcacgtatggggaagtctttaaggctcgagacaaggtgtcaggggacctggtggcactgaagatggtgaagatggagcctgatgatgatgtctccacccttcagaaggaaatcctcatattgaaaacttgccggcacgccaacatcgtggcctaccatgggagttatctctggttgcagaaactctggatctgcatggaattctgtggggctggttctctccaggacatctaccaagtgacaggctccctgtcagagctccagattagctatgtctgccgggaagtgctccagggactggcctatttgcactcacagaagaagatacacagggacatcaagggagctaacatcctcatcaatgatgctggggaggtcagattggctgactttggcatctcggcccagattggggctacactggccagacgcctctctttcattgggacaccctactggatggctccggaagtggcagctgtggccctgaagggaggatacaatgagctgtgtgacatctggtccctgggcatcacggccatcgaactggccgagctacagccaccgctctttgatgtgcaccctctcagagttctcttcctcatgaccaagagtggctaccagcctccccgactgaaggaaaaaggcaaatggtcggctgccttccacaacttcatcaaagtcactctgactaagagtcccaagaaacgacccagcgccaccaagatgctcagtcatcaactggtatcccagcctgggctgaatcgaggcctgatcctggatcttcttgacaaactgaagaatcccgggaaaggaccctccattggggacattgaggatgaggagcccgagctaccccctgctatccctcggcggatcagatccacccaccgctccagctctctggggatcccagatgcagactgctgtcggcggcacatggagttcaggaagctccgaggaatggagaccagacccccagccaacaccgctcgcctacagcctcctcgagacctcaggagcagcagccccaggaagcaactgtcagagtcgtctgacgatgactatgacgacgtggacatccccacccctgcagaggacacacctcctccacttccccccaagcccaagttccgttctccatcagacgagggtcctgggagcatgggggatgatgggcagctgagcccgggggtgctggtccggtgtgccagtgggcccccaccaaacagcccccgtcctgggcctcccccatccaccagcagcccccacctcaccgcccattcagaaccctcactctggaacccaccctcccgggagcttgacaagcccccacttctgccccccaagaaggaaaagatgaagagaaagggatgtgcccttctcgtaaagttgttcaatggctgccccctccggatccacagcacggccgcctggacacatccctccaccaaggaccagcacctgctcctgggggcagaggaaggcatcttcatcctgaaccggaatgaccaggaggccacgctggaaatgctctttcctagccggactacgtgggtgtactccatcaacaacgttctcatgtctctctcaggaaagaccccccacctgtattctcatagcatccttggcctgctggaacggaaagagaccagagcaggaaaccccatcgctcacattagcccccaccgcctactggcaaggaagaacatggtttccaccaagatccaggacaccaaaggctgccgggcgtgctgtgtggcggagggtgcgagctctgggggcccgttcctgtgcggtgcattggagacgtccgttgtcctgcttcagtggtaccagcccatgaacaaattcctgcttgtccggcaggtgctgttcccactgccgacgcctctgtccgtgttcgcgctgctgaccgggccaggctctgagctgcccgctgtgtgcatcggcgtgagccccgggcggccggggaagtcggtgctcttccacacggtgcgctttggcgcgctctcttgctggctgggcgagatgagcaccgagcacaggggacccgtgcaggtgacccaggtagaggaagatatggtgatggtgttgatggatggctctgtgaagctggtgaccccggaggggtccccagtccggggacttcgcacacctgagatccccatgaccgaagcggtggaggccgtggctatggttggaggtcagcttcaggccttctggaagcatggagtgcaggtgtgggctctaggctcggatcagctgctacaggagctgagagaccctaccctcactttccgtctgcttggctcccccaggcctgtagtggtggagacacgcccagtggatgatcctactgctcccagcaacctctacatccaggaatgagtccctaggggggtgtcaggaactagtccttgcaccccctcccccatagacacactagtggtcatggcatgtcctcatctcccaataaacatgactttagcctctgctaaaaaaa

SEQ ID NO: 12 - DNA, 2046 bp, Homo sapiens
  misc_feature: Incyte ID No: 255966.9
gtcccgggctgggcatgcgccacttgtgcggcagtcgggtgggaagccgtgtctcgcagtcgtggactcgtgcagctggggcgtccgcagccgctcgtcacccgcgtgatgctgtttctggcgttgggcagcccgtgggcggtcgaactgcctctctgcggaaggaggactgcattgtgtgcggccgccgcgctccgaggtccccgggcctctgtctcccgggcgtcctccagcagcgggccttcggggccggtagccggctggagtacggggccttcgggagccgcgcgccttctccggcgtccgggtcgagcgcagatccctgtttattgggaaggatatgttcgattcttaaatacgccatctgacaaatcagaagatggaaggctaatttatactggcaatatggcccgagcagtgtttggtgtgaaatgtttctcttattctacgagtctgattggccttacatttctgccatacatttttacacaaaataatgctatttctgaaagtgtgcctctgcctattcaaatcatattctatggcatcatgggaagctttacggtgatcaccccagtgctgcttcactttattacaaaaggctatgtcattcgattgtaccatgaggccacaacagacacttataaagccattacctacaatgctatgcttgcagaaacgagtacagtgtttcaccagaatgatgtgaagattccagatgctaaacatgtatttaccacattttatgctaaaacaaaatcactgttagttaatccagtgctctttccaaaccgtgaagactatatccatctaatgggttatgacaaagaagaatttattttgtatatggaagaaaccagtgaagagaaacggcataaagatgacaaatgagcctatttgttagtgttcgtgcttaaatgtgatttacgttttaatgtataataataaaattgccttttgcattccgttagtgactgattgttaaaaataatttgaaattatcaaagcttttaatttccagagaatgatgtttgtttataataaaacaagctatgtttgaaaaccaaaatgtagtatctaccattcgtgttttagaaaggtatgtgaataaatatgttcatgctagtataagagttctgtgttactgtggttgactctaaactggggatctgatgtcagtagcaaatgggagagttgctttattctttgtgtatggatttttctaagtgtataaatattttccgacattaaaagacattttctctttgaggaagacacagtcataggtggtgcggagctgtggtccacctgctcctgctcctgactcactgctctttgctgttgcctgaggaccaagtctgtcaggaagctggctaggaagccttgcagcagccatggcttttaaacataccagaaaaacacccgtggagtcagaggtggcaattcaccgaattcatatcactctaacgagttgcaacgtaaaatccctggataaggtgtgtgctgacttgatctgaggagcaaaggaaaagaatcagtgaaaggaccagtttgaatgcctaccaagactttgagaatcactacaagaaaaacttacggtgaaggttctaaggcatgggatcgtttccagatgagaatccacaagcgactcattgacttgcgcagtcctcagatagttaagcagattacttccatcagtattgagccaggagttgagatggaagtcaccattgcaaatgcttaagtcaactgttttcataaattgattaccagttgttaaaagattttcaaaaaaccgcaaaatttcaagaaattcacaaattatgggagcagttttaagtcttctttggttcagaacacaggtttttgcctaacccctggcatgattgcccataagaacatacatgtacagttgaactggtggttagctatacgggaaatggtaagtagtgttgtcttcagtatcttaatttgtttctgcaactgtgcactcctcccttggtggcaccctatgggtgtaggaaaaccactgttattaaacaggtg

SEQ ID NO: 13 - DNA, 6743 bp, Homo sapiens
  misc_feature: Incyte ID No: 406387.7
  unsure 2667: a, t, c, g, or other
ggagaactggtttgactttagctcaaatcagcagaaatatcacatgaaagaaaatattttttcttaatttggaattgtagtttggacaggatgagagtcatttggcaccacatttgggtctctcaaaaccattcaaattcctgagcacttgaccggttggtgtgtgtcgaagaaacctgactgcgccctgaggagaacagcggagaaggtccaccgagcctggcgaaaggtccgctgagcgggctgtcgtccggagccactccgggctgcggagcacccagtggagaccgcgcctggctcaggtgtgggaccccatccttcctgtcttcgcagaggagtcctcgcgtgaaataagcgggttttgaaaacaaaaaaaagaaggagtggaagagggggccaggatccaggcctccatccccacagaagtgaagctacagctgggaggtctcctcccaccccaaccgtcaccctgggtcccgactgcccacctcctcctcctccccctccccccaagaacaacaacaacaacaactccaagcacaccggccataagagtgcgtgtgtccccaacatgaccgaacgaagaagggacgagctctctgaagagatcaacaacttaagagagaaggtcatgaagcagtcggaggagaacaacaacctgcagagccaggtgcagaagctcacagaggagaacaccacccttcgagagcaagtggaacccacccctgaggatgaggatgatgacatcgagctccgcggtgctgcagcagctgctgccccaccccctccaatagaggaagagtgcccagaagacctcccagagaagttcgatggcaacccagacatgctggctcctttcatggcccagtgccagatcttcatggaaaagagcaccagggatttctcagttgatcgtgtccgtgtctgcttcgtgacaagcatgatgaccggccgtgctgcccgttgggcctcagcaaagctggagcgctcccactacctgatgcacaactacccagctttcatgatggaaatgaagcatgtctttgaagaccctcagaggcgagaggttgccaaacgcaagatcagacgcctgcgccaaggcatggggtctgtcatcgactactccaatgctttccagatgattgcccaggacctggattggaacgagcctgcgctgattgaccagtaccacgagggcctcagcgaccacattcaggaggagctctcccacctcgaggtcgccaagtcgctgtctgctctgattgggcagtgcattcacattgagagaaggctggccagggctgctgcagctcgcaagccacgctcgccaccccgggcgctggtgttgcctcacattgcaagccaccaccaggtagatccaaccgagccggtgggaggtgcccgcatgcgcctgacgcaggaagaaaaagaaagacgcagaaagctgaacctgtgcctctactgtggaacaggaggtcactacgctgacaattgtcctgccaaggcctcaaagtcttcgccggcgggaaactccccggccccgctgtagagggaccttcagcgaccgggccagaaataataaggtccccacaagatgatgcctcatctccacacttgcaagtgatgctccagattcatcttccgggcagacacaccctgttcgtccgagccatgatcgattctggtgcttctggcaacttcattgatcacgaatatgttgctcaaaatggaattcctctaagaatcaaggactggccaatacttgtggaagcaattgatgggcgccccatagcatcgggcccagttgtccacgaaactcacgacctgatagttgacctgggagatcaccgagaggtgctgtcatttgatgtgactcagtctccattcttccctgtcgtcctaggggttcgctggctgagcacacatgatcccaatatcacatggagcactcgatctatcgtctttgattctgaatactgccgctaccactgccggatgtattctccaataccaccatcgctcccaccaccagcaccacaaccgccactctattatccagtagatggatacagagtttaccaaccagtgaggtattactatgtccagaatgtgtacactccagtagatgagcacgtctacccagatcaccgcctggttgaccctcacatagaaatgatacctggagcacacagtattcccagtggacatgtgtattcactgtccgaacctgaaatggcagctcttcgagattttgtggcaagaaatgtaaaagatgggctaattactccaacgattgcacctaatggagcccaagttctccaggtgaagagggggtggaaactgcaagtttcttatgattgccgagctccaaacaattttactatccagaatcagtatcctcgcctatctattccaaatttagaagaccaagcacacctggcaacgtacactgaattcgtacctcaaatacctggataccaaacataccccacatatgccgcgtacccgacctacccagtaggattcgcctggtacccagtgggacgagacggacaaggaagatcactatatgtacctgtgatgatcacttggaatccacactggtaccgccagcctccggtaccacagtacccgccgccacagcccggccgggccttccaaccaatnccaaccatcgcggcccggcctgccctcccaatgcgttacagtaccctgtaaatacctgtcatgtccttcaggatctctgccctcaaaatttattcctgttcagcttctcaatcagtgactgtgtgctaaattttaggctactgtatcttcaggccacctgaggcacatcctctctgaaacggctatggaaggttagggccaccctggactggcacacatcctaaagcaccaaaagaccttcaacattttctgagagcaacagagtatttgccaataaatgatctctcatttttccaccttgactgccaatctaactaaaataattaataagtttactttccagccagtcctggaagtctgggttttacctgccaaaacctccatcaccatctaaattataggctgccaaatttgctgtttaacatttacagagaagctgatacaaacgcaggaaatgctgatttctttatggagggggagacgaggaggaggaggacatgacttttcttgcggtttcggtaccctctttttaaatcactggaggactgaggccttattaaggaagccaaaattatcggtgcagtgtggaaaggcttccgtgatcctctcgctgcacccttagaaacttcaccgtcttcaaactccatttccatggttctgttaattctcaaggagcagcaactcgactggttctcccaggagcaggaaaaacccttgtgacatgaaacatctcaggcctgaaaagaaagtgctctctcagatggactcttgcatgttaagactatgtcttcacatcatggtgcaaatcacatgtacccaatgactccggctttgacacaacaccttaccatcatcatgccatgatggcttccacaaagcattaaacctggtaaccagagattactggtggctccagcgttgttagatgttcatgaaatgtgaccacctctcaatcacctttgagggctaaagagtagcacatcaaaaggactccaaaatcccatacccaactcttaagagatttgtcctggtacttcagaaagaattttcatgagtgttcttaattggctggaaaagcaccagctgacgttttggaagaatctatccatgtgtctgcctccatatgcatctgggcatttcatcttcagtcccctcattagactgtagcattaggatgtgtggagagaggagaaatgatttagcacccagattcacactcctatgcctggaagggggacatctttgaagaagaggaattagggctgtggacactgtcttgaggatgtggacttccttagtgagctccacattacttgatggtaaccacttcaaaaggatcagaatccacgtaatgaaaaaggtccctctagaggatggagctgatgtgaagctgccaatggatgaaaagcctcagaaagcaactcaaaggactcaaagcaacggacaacacaagagttgtcttcagcccagtgacacctctgatgtcccctggaagctttgtgctaacctgggactgcctgacttcctttagcctggtcccttgctactaccttgaactgttttatctaacctctctttttctgtttaattctttgctactgccattgaccctgctgcaggatttgtgtcattttcctgcctggttgctgagactccattttgctgccacacacagagatgtaagaggcaggctttaattgccaaagcacagtttgagcagtagaaaacaacatggtgtatatctcaaattgcctgacatgaagaggagtctaacggtgaagtttcacttttcatcagcatcatctttcacatgttcattatcatccgctcttattcttgcatgtttaaacacttaaaatttttagtataatttttagtgtgttttgaagtggtgactaggctttcaaaaacttccattgaattacaaagcactatccagttcttattgttaaactaagtaaaaatgataagtaacatagtgtaaaatattcctttactgtgaacttcttacaatgctgtgaatgagaggctcctcagaactggagcatttgtataataattcatcctgttcatcttcaattttaacatcatatataatttcaattctatcaattgggcctttaaaaatcatataaaaggatataaaatttgaaaagagaaacctaattggctatttaatccaaaacaactttttttttccttcaatggaatcagaaagcttgtcaatcactcatgtgttttagagtaattacttttaaaatggtgcatttgtgcttctgaactattttgaagagtcacttctgtttacctcaagtatcaattcatcctccatacatttgaattcaagttgttttttgtcaaatttacagttgtcaattgatcttcaagctgcagggtgcctagaaatgggccgttgtctgtagccctggcatgtgcacacggacatttgccaccactgcaagcaaaagtctggagaagttcaccaacgacaagaacgattagggaaaatatgctgctgtgggttaacaactcagaaagtccctgatccacatttggctgtttactaaagcttgtgattaactttttggcagtgtgtactatgctctattgctatatatgctatctataaatgtagatgttaaggataagtaattctaaatttattattctatagttttgaagtttggttaagtttcctttcactcaattgatttattttgttgttaatcaaatttatgttaattggatcctttaaattttttttggcattttccaacaaaaatggctttattcataagaaaggaaaaaaatcaatggaatttgatatctaaagaagttagaaagggagcaaaataaaaaacataaaggagatagatgaattagtaagcaaatcagtagtcgagtttttcaaactggcaaaattaattaattgacttttagcccaaatttacattgttaattaaatcaagaaggaagaagatctaagagctcccattgataggcaagcctagagagaactagctaaatttatcatgctaggatattgaaacacagaaagtttacatacatttatgaagggtcaatttagtttggacagtgaggtatttgtcttagtggaaaaaaggagaattagtctgatcaaatcgtgaagtaatacagtgaacttgcaggtgcacaaaataagagggccacatctatatggtgcagtctggaattctgtttaagtttgtaggtacctcttggacttctgaattgatccagttgtcatccaccacagacatctcacatcagatacagacagttccaagattgacaacagagaacaacctgctggaaagacctgggcagaaatggagagccctgcgggaaccatgctacattttcatctaaagagagaatgcacatctgatgagactgaaagttctttgttgttttagattgtagaatggtattgaattggtctgtggaaaattgcattgcttttatttctttgtgtaatcaagtttaagtaataggggatatataatcataagcattttagggtgggagggactattaagtaattttaagtgggtggggttatttagaatgttagaataatattatgtattagatatcgctataagtggacatgcgtacttacttgtaaccctttaccctataattgctatccttaaagatttcaaataaactcggagggaactgcagggagaccaacttatttagagcgaattggacatggataaaaaccccagtgggagaaagttcaaaggtgattagattaataatttaatagaggatgagtgacctctgataaattactgctagaatgaacttgtcaatgatggatggtaaattttcatggaagttataaaagtgataaataaaaacccttgcttttacccctgtcagtagccctcctcctaccactgaaccccattgcccctacccctccttctaactttattgctgtattctcttcactctatatttctctctatttgctaatattgcattgctgttacaataaaaattcaataaagatttagtggttaagtgcaaaaaacaaaaaaagg

SEQ ID NO: 14 - DNA, 3827 bp, Homo sapiens
  misc_feature: Incyte ID No: 062199.7
cgccccctccccgtccccgccgctgcagccgtcgccttcggagcgaagggtaccgacccggcagaagctcggagctctcggggtatcgaggaggcaggcccgcgggcgcacgggcgagcgggccgggagccggagcggcggaggagccggcagcagcggcgcggcgggctccaggcgaggcggtcgacgctcctgaaaacttgcgcgcgcgctcgcgccactgcgcccggagcgatgaagatggtcgcgccctggacgcggttctactccaacagctgctgcttgtgctgccatgtccgcaccggcaccatcctgctcggcgtctggtatctgatcatcaatgctgtggtactgttgattttattgagtgccctggctgatccggatcagtataacttttcaagttctgaactgggaggtgactttgagttcatggatgatgccaacatgtgcattgccattgcgatttctcttctcatgatcctgatatgtgctatggctacttacggagcgtacaagcaacgcgcagcctggatcatcccattcttctgttaccagatctttgactttgccctgaacatgttggttgcaatcactgtgcttatttatccaaactccattcaggaatacatacggcaactgcctcctaattttccctacagagatgatgtcatgtcagtgaatcctacctgtttggtccttattattcttctgtttattagcattatcttgacttttaagggttacttgattagctgtgtttggaactgctaccgatacatcaatggtaggaactcctctgatgtcctggtttatgttaccagcaatgacactacggtgctgctacccccgtatgatgatgccactgtgaatggtgctgccaaggagccaccgccaccttacgtgtctgcctaagccttcaagtgggcggagctgagggcagcagcttgactttgcagacatctgagcaatagttctgttatttcacttttgccatgagcctctctgagcttgtttgttgctgaaatgctactttttaaaatttagatgttagattgaaaactgtagttttcaacatatgctttgctggaacactgtgatagattaactgtagaattcttcctgtacgattggggatataatgggcttcactaaccttccctaggcattgaaacttcccccaaatctgatggacctagaagtctgcttttgtacctgctgggccccaaagttgggcatttttctctctgttccctctcttttgaaaatgtaaaataaaaccaaaaatagacaactttttcttcagccattccagcatagagaacaaaaccttatggaaacaggaatgtcaattgtgtaatcattgttctaattaggtaaatagaagtccttatgtatgtgttacaagaatttcccccacaacatcctttatgactgaagttcaatgacagtttgtgtttggtggtaaaggattttctccatggcctgaattaagaccattagaaagcaccaggccgtgggagcagtgaccatctactgactgttcttgtggatcttgtgtccagggacatggggtgacatgcctcgtatgtgttagagggtggaatggatgtgtttggcgctgcatgggatctggtgcccctcttctcctggattcacatccccacccagggcccgcttttactaagtgttctgccctagattggttcaaggaggtcatccaactgactttatcaagtggaattgggatatatttgatatacttctgcctaacaacatggaaaagggttttcttttccctgcaagctacatcctactgctttgaacttccaagtatgtctagtcaccttttaaaatgtaaacattttcagaaaaatgaggattgccttccttgtatgcgctttttaccttgactacctgaattgcaagggatttttatatattcatatgttacaaagtcagcaactctcctgttggttcattattgaatgtgctgtaaattaagtcgtttgcaattaaaacaaggtttgcccacatccaaacaacttaatttacagcacattcaataatgaaccaacaggagagttgctgactttgtaacatatgaatatataaaaatcccttgcaattcaggtagtcaaggtaaaaagcgcatacaaggaaggcaatcctcatttttctgaaaatgtttacattttaaaaggtgactagacatacttggaagttcaaagcagtaggatgtagcttgcagggaaaagaaaacccttttccatgttgttaggcagaagtatatcaaatatatcccaattccacttgataaagtcagttggatgacctccttgaaccaatctagggcagaacacttagtaaaagcgggccctgggtggggatgtgaatccaggagaagaggggcaccagatcccatgcagcgccaaacacatccattccaccctctaacacatacgaggcatgtcaccccatgtccctggacacaagatccacaagaacagtcagcagatggtcactgctcccacggcctggtgctttctaatggtcttaattcaggccatggagaaaatcctttaccaccaaacacaaactgtcattgaacttcagtcataaaggatgttgtgggggaaattcttgtaacacatacataaggacttctatttacctaattagaacaatgattacacaattgacattcctgtttccataaggttttgttctctatgatggaatggctgaagaaaaagttgtctatttttggttttattttacattttcaaaagagagggaacagagagaaaaatgcccaactttggggcccagcaggtacaaaagcagacttctaggtccatcagatttgggggaagtttcaatgcctagggaaggttagtgaagcccgttatatccccaatcgtacaggaagaattctacagttaatctatcacagtgttctagcaaagcatatgttgaaaactacagttttcaatctaacatctaaattttaaaaagtagcatttcagcaacaaacaagctcagagaggctcatggcaaaagtgaaataacagaactattgctcagatgtctgcaaagtcaagctgctgccctcagctccgcccacttgaaggcttaggcagacacgtaaggtggcggtggctccttggcagcaccattcacagtggcatcatcatacgggggtagcagcaccgtagtgtcattgctggtaacataaaccaggacatcagaggagttcctaccattgatgtatcggtagcagttccaaacacagctaatcaagtaacccttaaaagtcaagataatgctaataaacagaagaataataaggaccaaacaggtaggattcactgacatgacatcatctctgtagggaaaattaggaggcagttgccgtatgtattcctgaatggagtttggataaataagcacagtgattgcaaccaacatgttcagggcaaagtcaaagatctggtaacagaagaatgggatgatccaggctgcgcgttgcttgtacgctccgtaagtagccatagcacatatcaggatcatcccattcttctgttaccagatctttgactttgccctgaacatgttggttgcaatcactgtgcttatttatccaaactccattcaggggtacatacggcaactgcctcctaattttccctacagagatgatgtcatgtcagtgaatcctacctgtttggtccttattattcttctgtttattagcattatcttgacttttaagggttacttgattagctgtgtttggaactgctaccgatacatcaatggtagga

SEQ ID NO: 15 - DNA, 1543 bp, Homo sapiens
  misc_feature: Incyte ID No: 1383059.61
ttgctcatgaaaattatagctctcaaagagtaaatggtcttatatagaaaacacaaatttaaattactttaattaaagggaattgagagattgggaataagaagggttaacttgatccaaaacatactcacagatcactatccttaacaggtgttgttacttaattttaatatcagagtgctgtgcatatatttccacaaatactaaaaaaaagatacttccaagcctaagtctctgctttcatcccacattaagtctatcatcacaaatcaaaatttaggccactgtattaaaatacagcctattcctacagtaagaaaatgcacctgcagaggggtccatacggcgttgttctggattcccgtcgtaacttaaagggaaattttcacaatgtccggagcccttgatgtcctgcaaatgaaggaggaggatgtccttaagttccttgcagcaggaacccacttaggtggcaccaatcttgacttccagatggaacagtacatctataaaaggaaaagtgatggcatctatatcataaatctcaagaggacctgggagaagcttctgctggcagctcgtgcaattgttgccattgaaaaccctgctgatgtcagtgttatatcctccaggaatactggccagagggctgtgctgaagtttgctgctgccactggagccactccaattgctggccgcttcactcctggaaccttcactaaccagatccaggcagccttccgggagccacggcttcttgtggttactgaccccagggctgaccaccagcctctcacggaggcatcttatgttaacctacctaccattgcgctgtgtaacacagattctcctctgcgctatgtggacattgccatcccatgcaacaacaagggagctcactcagtgggtttaatgtggtggatgctggctcgggaagttctgcgcatgcgtggcaccatttcccgtgaacacccatgggaggtcatgcctgatctgtacttctacagagatcctgaagagattgaaaaagaagagcaggctgctgctgagaaggcagtgaccaaggaggaatttcagggtgaatggactgctcccgctcctgagttcactgctactcagcctgaggttgcagactggtctgaaggtgtacaggtgccctctgtgcctattcagcaattccctactgaagactggagcgctcagcctgccacggaagactggtctgcagctcccactgctcaggccactgaatgggtaggagcaaccactgactggtcttaagctgttcttgcataggctcttaagcagcatggaaaaatggttgatggaaaataaactgtagaacctgagtatttttctttttaccagttttttagtttgagctcttaggtttattggagctagcaataattggttctggcaagtttggccagactgacttcaaaaaattaatgtgtatccagggacattttaaaaacctgtacacagtgtttattgtggttaggaagcaatttcccaatgtacctataagaaatgtgcatcaagc

SEQ ID NO: 16 - DNA, 1605 bp, Homo sapiens
  misc_feature: Incyte ID No: 332595.5
atcctggtcaataccgtgctggaccgcgagcagactgacaggtatgagtttaaagttaacgccaaagacaaaggcatccccgtgctgcagggcagcactacggtgattgtgcaggtggctgataaaaatgacaatgaccctaagtttatgcaggacgtcttcaccttttatgtgaaagaaaacttgcagcccaacagccctgtggggatggtcaccgtgatggatgctgacaaggggcggaatgcagagatgagcctgtacatagaggagaacaataacattttttctattgaaaatgacacggggaccatttactccacaatgtcttttgaccgggaacatcagaccacatacactttcagagtcaaggctgtggatgggggagatcctcccagatctgccacagctacagtctcgctttttgtgatggatgaaaatgacaatgctcccacagttacccttcccaaaaacatttcctacactttactgccaccttcgagtaatgtcaggacagtagtagctacagtgttggcaacagacagtgatgatggcatcaatgcagacctgaactacagcattgtgggaggaaatcccttcaagctgtttgaaattgatcccactagtggtgtggtttccttagtgggaaaactcacccaaaagcattatggcttgcacaggttggtggtgcaagtgaatgacagtgggcagccttcccagtccaccacgactctggtgcacgtgtttgtcaatgaaagtgtttctaatgcaactgcgattgactcccagatagctagaagtttgcacatcccactcacccaggatatagctggtgacccaagctatgaaattagcaaacagagactcagtattgtcattggcgtggttgctggcattatgacggtgattctaatcatcttaattgtagtgatggcaaggtactgcaggtccaaaaataaaaatggctatgaagccggcaaaaaagatcacgaagacttttttacaccccaacagcatgacaaatctaaaaagcctaaaaaggacaagaaaaacaaaaaatctaagcagcctctctacagcagcattgtcactgtggaggcttctaagccaaatggacagaggtatgatagtgtcaatgagaagctgtcagacagcccaagcatggggcgatacaggtccgttaatggtgggcccggcagtcctgacctggcaaggcattacaaatctagttccccattgcctactgttcagcttcatccccagtcaccaactgcaggaaaaaaacaccaggccgtacaagatctaccaccagccaacacatttgtgggagcaggagacaacatttcaattggatcagatcactgctctgagtacagctgtcaaaccaataacaagtacagcaaacaggtggatacagtgcagaccatgaacccctctggccacattgaggaatcgtgtaaaatgaatccatttcgtagagtgacgttttctgttgtgagtcagcctcaggacccacatcaggggtcactgcagagttgctatgacagcgggctggaggagtcagaaacaccaagcagtaagagttcatcaggggccagactgggtgcg

SEQ ID NO: 17 - DNA, 4732 bp, Homo sapiens
  misc_feature: Incyte ID No: 332595.12
gagagagaggctgcaatctcctccctgaatctgcgcacagcgctgcagatcccactgctccgacatgcgggccgaatgcaggtgagaaaaggcacggactctgcggctgcgaacccaaacttgggcaccgcacggtgcgcactgctcagccttcgcccccgtgggcgaaaggctgctgcggtttcaggcggctgcttcgtgactaatgaccttgcgcagagttgttaagaaaaaagagaaacccgcgctctccggggtgagaagggactgactctgggcgtctctgaagatggctcgggcttctctttggcgcgccggggggaccctgacactgaccgctctgtgacgcgagtagtctcccctgcaccgtgcccgaagcgacgtgccgggggatttttcattctcgatctgttgactggctcccccgctgcatgagcagagtcggagttgagactggcttgttgctggccccagcgcctggtgcaggaagcgactcacgtttgtctgggtggccggagccggagccggagcagagcctgggtttggagtgagtgcctggaacgtgaattggactcaactcgagtagcagcaaagaccagcgggctggcaggcgggggaggctgcaggctcattccccacctcttcccagccccactgcccgtctgccggagcggttctggccccttccgacagagcggggactagagccggggattctccgcccgctgaggggatgactctgggttgggggagcgccgaacccgcggcgcgcagtgtcccgtgaactgtgagtactgcgactgaacggcggcaggcgagcgggcgattagcacccattgcatgaattatgaaacaataactttcggaagaagcaggaggaaaaaaagaagcatctatcgctgccctcccacccccattcccggccaactctccacgccgcttttgccccctccctcccctccctctcgctccttcctttccgggagaggggagaggactcgggggagggcaggcggccggccccggaggaggggggcgccgagggggctgtggttaggaaggacgcagtagccagcaagcagccagcgagcacgatgctgaggatgcggaccgcgggatgggcgcgcggctggtgcttgggctgctgcctcctcctgccgctctcgttcagcctggcggccgccaagcagctcctccggtaccggctggccgaggagggccccgccgacgtccgcatcggcaacgtggcttcagacctgggcatcgtgaccggatcgggtgaggtgactttcagcctggagtccggttccgagtacctgaagatcgacaacctcactggcgagctgagcacgagcgagcggcgcatcgaccgcgagaagctgccccagtgtcagatgatcttcgacgagaacgagtgcttcctggacttcgaggtgtcggtgatcgggccctcgcagagctgggtggacctgtttgagggtcaggtcatcgtgcttgacatcaacgacaacacgcccaccttcccgtcgcccgtgctcacgctcacggtggaggagaatcggccggtgggcacactttacctgctgcccacagccaccgaccgcgacttcggccgcaacggcatcgagcgctacgagctgctccaggagcccggaggcggcggcagcggcggcgagagccggcgcgccggggcggccgacagcgccccctaccccgggggcggcgggaacggcgcgagcggcggcggctcgggaggctccaagcggcggctggacgcatcagagggcggcggcggcaccaaccccggcggccgcagcagcgtgttcgagctgcaggtggcggacaccccggacggcgagaagcagccgcagctgatcgtgaagggggcgctggaccgcgagcagcgcgactcctacgagctgaccctgcgagtgcgcgacggcggcgacccgcctcgctcctcgcaggccatcctacgggtcctcatcaccgacgtgaacgacaacagcccccgcttcgagaagagcgtgtacgaggccgacttggctgagaacagcgccccggggacccccatcctgcaactgcgcgcagccgacttggacgtgggggtcaacgggcagatcgaatacgtgttcggggcggccaccgagtcggtgaggcggctgctgcgccttgacgagacgtccggctggctcagcgtcctgcaccggatcgaccgcgaggaggtgaaccagctgcgcttcacggtcatggcccgcgaccgcgggcagccccccaagaccgacaaggccaccgtggtccttaacatcaaagacgagaacgacaacgtgccgtccattgaaatccgcaagattgggcgcatccccctcaaggacggggtggccaacgtggccgaggacgttctggtcgacacccccatcgctctggtgcaggtgtccgaccgagaccaaggcgagaacggggtggtcacctgcaccgtggtgggcgacgtgcccttccagctcaagccagccagcgacaccgagggcgaccagaacaagaaaaagtacttcttgcacacctcgacccctctggactatgaggccacccgggagttcaacgtggtcatcgtggcggtggactcaggcagccccagcctctcgagcaacaactccctgattgtcaaggtgggagacaccaacgacaacccgcccatgttcggccagtcggtggtggaggtttacttccctgagaacaacatcccgggcgagagggtggccacggtgctggcgacagacgcagacagcggtaagaacgccgagatcgcctactcgctggactcctctgtgatggggatctttgccatcgatcccgattctggggacatcctggtcaataccgtgctggaccgcgagcagactgacaggtatgggtttaaagttaacgccaaagacaaaggcatccccgtgctgcagggcagcactacggtgattgtgcaggtggctgataaaaatgacaatgaccctaagtttatgcaggacgtcttcaccttttatgtgaaagaaaacttgcagcccaacagccctgtggggatggtcaccgtgatggatgctgacaaggggcggaatgcagagatgagcctgtacatagaggagaacaataacattttttctattgaaaatgacacggggaccatttactccacaatgtcttttgaccgggaacatcagaccacatacactttcagagtcaaggctgtggatgggggagatcctcccagatctgccacagctacagtctcgctttttgtgatggatgaaaatgacaatgctcccacagttacccttcccaaaaacatttcctacactttactgccaccttcgagtaatgtcaggacagtagtagctacagtgttggcaacagacagtgatgatggcatcaatgcagacctgaactacagcattgtgggaggaaatcccttcaagctgtttgaaattgatcccactagtggtgtggtttccttagtgggaaaactcacccaaaagcattatggcttgcacaggttggtggtgcaagtgaatgacagtgggcagccttcccagtccaccacgactctggtgcacgtgtttgtcaatgaaagtgtttctaatgcaactgcgattgactcccagatagctagaagtttgcacatcccactcacccaggatatagctggtgacccaagctatgaaattagcaaacagagactcagtattgtcattggcgtggttgctggcattatgacggtgattctaatcatcttaattgtagtgatggcaaggtactgcaggtccaaaaataaaaatggctatgaagccggcaaaaaagatcacgaagacttttttacaccccaacagcatgacaaatctaaaaagcctaaaaaggacaagaaaaacaaaaaatctaagcagcctctctacagcagcattgtcactgtggaggcttctaagccaaatggacagaggtatgatagtgtcaatgagaagctgtcagacagcccaagcatggggcgatacaggtccgttaatggtgggcccggcagtcctgacctggcaaggcattacaaatctagttccccattgcctactgttcagcttcatccccagtcaccaactgcaggaaaaaaacaccaggccgtacaagatctaccaccagccaacacatttgtgggagcaggagacaacatttcaattggatcagatcactgctctgagtacagctgtcaaaccaataacaagtacagcaaacagatgcgtctacatccatacattactgtgtttggctgaattccactctaatatgatgctccattatgcaccatactgtgatgacctttctactccgaaacctgctggagcctgcccttggccgtggggtgtcagccaatcactgcttgttccacttgttgtacattttatttttgagtctttttctttctcatatacagaaaaatagtatgaaaataaaataaatgtatgaaacagtattaatgcagaaatgtgctactaatggatgtctgagtcaccagaaattccattcttaaagaggcggttagcacctattagacgtaacagtgatgtcttttaaaaaatccaaaagcatattgcaacaataagtttgagactttgtgtgaacaaagggaaattcagcctcttatgtctttgtctttaatacattaaatactgattttgaataaaaatctaaattgatcaat

SEQ ID NO: 18 - DNA, 5252 bp, Homo sapiens
  misc_feature: Incyte ID No: 5401223cB1
gtttattttctcaatgcacgtagactcctacttgcattttactttcattgccatttttacaggccaaatgacataggatgaaggctgttcgtaacctgctgatttatatattttccacctatctcctggttatgtttggatttaatgctgcccaagacttctggtgttcaactttggtgaagggagtcatttatggatcgtattctgtaagtgaaatgtttcctaaaaactttacaaactgcacttggacgctggaaaatccagatccaaccaaatatagcatttacctgaaattttccaaaaaggaccttagctgctctaacttttcactcctggcttatcagtttgatcatttttcccatgaaaaaataaaggatcttttaagaaagaatcattctataatgcaactctgcaattccaagaatgctttcgtttttctacagtatgataaaaattttattcaaatacgtcgagtatttccaactaatttcccaggattacagaaaaaaggggaagaagatcagaaatctttttttgagtttttggtattgaacaaggtcagcccaagccagtttggttgccatgtattatgtacttggttggagagctgcttaaaatcagaaaatgggagaacagaatcatgtgggatcatgtatacaaaatgcacctgccctcagcatttgggagagtgggggatcgacgaccagtcgctgattttgttaaataacgtggtgttacccctgaatgagcagacagagggctgcctgacccaggagctgcaaaccacccaagtctgcaatcttaccagggaggccaagcgaccacccaaagaagaatttggaatgatgggagatcatacaattaaaagtcagcgacctcgatctgttcatgaaaaaagggtccctcaggaacaagctgatgctgctaaatttatggcacaaactggtgaatctggtgtggaagagtggtcccagtggagcacatgttcggttacttgtggtcaagggtcgcaggtgcgaaccagaacttgtgtatcaccttacgggacacactgcagcggcccattaagagaatcaagggtttgcaataacactgccctctgtccagtacacggagtatgggaggaatggtcaccatggagtttatgttcatttacatgtggtcgaggccaaagaacaagaacaaggtcatgcacacctcctcagtatggaggaaggccgtgtgaaggacctgaaacacatcataagccttgtaatattgctctttgcccagttgatggacagtggcaagagtggagttcgtggagccagtgctcagtaacgtgctcgaatgggactcagcagagaagccggcagtgcactgcagctgcccatggaggctccgaatgcagagggccatgggcagaaagcagagagtgctataaccctgaatgtacagccaatggtcaatggaatcagtggggtcattggagtggttgttccaagtcctgtgatggcggctgggaaaggcgaataaggacctgtcagggtgcagtgataacagggcagcaatgtgaaggaacgggcgaagaagtgagaagatgcagtgagcagcgatgccctgcaccttatgaaatatgccctgaggattatctgatgtcgatggtgtggaaaagaactccagcaggcgacttggcattcaatcaatgtcccctgaatgccacaggcaccactagcagacgctgctctctcagtcttcatggagtggccttctgggaacagccgagctttgcaagatgcatatcaaatgagtacagacacttgcagcattcaattaaagagcaccttgctaaggggcagcgaatgctggcaggtgatggaatgtcccaggtgaccaagacactgttggatttaactcagagaaaaaatttctatgcaggcgatcttctgatgtctgtggagatcctgagaaatgtgacagacacatttaaaagggcaagttacatccctgcatctgatggtgtccagaacttctttcaaatagttagcaaccttctagatgaagaaaacaaggaaaaatgggaagatgcacaacagatttatccagggtcaatagagttaatgcaggtgattgaagattttatacacattgttggaatggggatgatggactttcagaattcatacttaatgactggaaatgtagtggctagtattcagaagcttcctgcagcctctgttctaacagacatcaactttccaatgaaaggacggaagggaatggttgactgggcaagaaactcagaagatagggtagtaattccaaaaagcattttcactccggtgtcatcaaaagaattagatgaatcatctgtatttgttcttggcgcagtcctatacaaaaacttagatctaattttgcccactttgagaaattatactgtcattaattccaaaatcatcgtggtcacaataaggcctgaacccaaaacaaccgattcgtttctggagatagaactagctcatttggctagtggtactttgaatccctattgtgtattgtgggatgactccaaaacgaacgagtctttgggaacgtggtccacccagggatgtaaaactgtgcttaccgatgcatcccatacgaaatgcttatgtgatcgtctctctaccttcgccattttggctcagcaacctagagaaataatcatggaatcctctggcacaccttcagttaccctaatagtaggcagtggtctttcttgcttggccttgattaccctagcagttgtctatgcagcattatggaggtacatacgctctgagagatccataatactaattaacttctgcctgtctatcatctcatccaatatcctcatactggttggacagactcagacacataataagagtatctgcacaaccaccactgcatttttgcactttttcttcctggcttcattctgttgggttttgactgaggcgtggcaatcatatatggctgtaactggaaaaattaggacacggcttataagaaaacgctttttgtgccttggatggggtttaccagcattagtagtggccacatcagtaggcttcaccagaacaaaaggatatggcactgatcactactgctggctctctcttgaaggaggactactctatgcttttgtgggacctgcagccgctgttgtcctggtcaacatggtgattggcattttggtatttaataaacttgtttccagagatggaatcctagataaaaagctcaaacacagagccggtcagatgagtgagcctcatagcggtttgacgctcaaatgtgccaagtgtggagtagtttcaacaacagctttgtcagccaccaccgccagtaacgccatggcgtctctttggagctcctgtgtggtgttgccccttctggctttgacgtggatgtctgcggttctggccatgacagatagacgctccatattgtttcaaatactttttgctgtgtttgattcattgcaaggctttgttatagtcatggtccactgcattcttcggagagaggttcaggatgcatttagatgccgattgagaaactgtcaggatcccatcaatgcagattcttcgagttcgtttcctaataggcatgctcaaatcatgacagactttgaaaaggatgtagacattgcctgtcgatcagttcttcataaggatattggtccttgccgagcagccacaataacaggaacactttctaggatttctctaaatgatgatgaagaagaaaagggaacaaaccctgaagggctaagctattcaacattgcctggaaatgtcatttccaaagtcatcatccagcaacccacaggtttgcacatgcccatgagtatgaatgagcttagcaatccatgtttgaaaaaagaaaatagtgaattgcggagaactgtgtacttatgtacggatgataatttgagaggggctgacatggacatagtccatcctcaagaaagaatgatggaaagtgactatattgtgatgcccagaagttctgtaaataaccagccttcaatgaaagaagaaagcaaaatgaatattggcatggaaaccttgccacatgaaaggctattgcactacaaagtaaaccctgaattcaatatgaatccccctgtaatggaccagttcaatatgaacttagagcaacatctcgcaccccaggaacatatgcagaatttgccctttgaacctcgcacagctgtgaagaatttcatggcctctgagttggatgataatgcaggactatcaagaagtgaaactggatcaacgatatcaatgagttctttagagagaagaaaatcacgatattcagaccttgactttgagaaggtcatgcatacaaggaagaggcatatggaactatttcaagaactaaatcagaaatttcaaactttggacagatttcgggatataccaaatacaagcagtatggaaaaccccgcaccaagcaagaatccatgggacactttcaaaaaccccagtgaatacccgcattacaccacaatcaatgtcttagacacagaggcaaaggatgctttggaactgaggccagcagagtgggagaagtgtctgaatttgcctctggatgtgcaagagggtgactttcaaacagaagtttaaaaaaatcaaaatggactaaggtagagacaaaactttattgcactgacacttaagacttgggaagcctgacatttctatctggacagtgtgactatcttatgtcaggaccttcatgtgccaaacgccagtggtgttttcatatggtaacttctcactagtcaggctagtggagagatgaccaggtgtacagttctgaccatcctgtgttgtaagtacccgtggaatggatttgtaaggtaatctttatagataaacctcaagcaacgattcatgttgtaaccgcttcatatggtttagttttcaaaaaacctcaccatgaagcacaatgtatatatttatgcagtttttaaagtttataacagtctgtttggccattactacactttttactttataatataaaagcaaagtttttgtcactaaatgaatgtttgttgagctacattcttcattgctttaaatgcaatgaagtaataatctcacttttatatgaataatatatttcacatctttattattgcagttttctctagaaagctctgagaagctttctctgctgcagctgtgtataaaatatttaaaatgttgtatggtgtaaataaactt

SEQ ID NO: 19 - DNA, 742 bp, Homo sapiens
  misc_feature: Incyte ID No: 002838.40
ccctggcattggttggcgccaggggaagccgaggctccatcctttctgcgcaggttcccgccgcactcgcgcagacctagcgcgtccaggtgggagtggcgcttgaggctacaagtccaagtatcttcagctcaagaagaagttagaagatgagttccccggccgcctggacatctgcggcgagggaactccccaggccaccgggttctttgaagtgatggtagccgggaagttgattcactctaagaagaaaggcgatggctacgtggacacagaaagcaagtttctgaagttggtggccgccatcaaagccgccttggctcagggctaatgcgccctgaaggcagagtccagggaccttgacccagcccctctcagcagacgcttcatgataggaaggactgaaaagtcttgtggacacctggtctttccctgatgttctcgtggctgctgttgggggcagagattgacgcccccggtctttgcctctgagcgggagagtctgtgtgtatgtgtcttccccggaatccacaccaacccaacctcctcctgtcccgtggtttcatcatatctctttgcataccccatgtcttccccagttgtcccctggagtttggggggacatcccgcctcaggcatccttctcaaggggaagccaagagaggcatcaggatgggtgggtttctgattgtggcacgtttgcaaccgttcacgattcataaatattggatgaatttaaccg

SEQ ID NO: 20 - DNA, 730 bp, Homo sapiens
  misc_feature: Incyte ID No: 378186.30
gccgcaacagaagccgtaaagctctctcccgtcgcgacgcagcgctcaaggcgcctgcgcagaccctgaaaagcggccagggtggcccctagctttccttttccggttgcggcgccgcgcggtgaggttgtctagtccacgctcggagccatgccgtccaagggcccgctgcagtctgtgcaggtcttcggacgcaagaagacagcgacagctgtggcgcactgcaaacgcggcaatggtctcatcaaggtgaacgggcggcccctggagatgattgagccgcgcacgctacagtacaagctgctggagccagttctgcttctcggcaaggagcgatttgctggtgtagacatccgtgtccgtgtaaagggtggtggtcacgtggcccagatttatgctatccgtcagtccatctccaaagccctggtggcctattaccagaaatatgtggatgaggcttccaagaaggagatcaaagacatcctcatccagtatgaccggaccctgctggtagctgaccctcgtcgctgcgagtccaaaaagtttggaggccctggtgcccgcgctcgctaccagaaatcctaccgataagcccatcgtgactcaaaactcacttgtataataaacagtttttgagggattttaaagtttcaagaactgtgtgtggccttatgtgttggtattggatgtttaaccagacagaaatcagtaaacatcctggacctaaaaa

SEQ ID NO: 21 - DNA, 677 bp, Homo sapiens
  misc_feature: Incyte ID No: 348196.83
  unsure 634, 666: a, t, c, g, or other
ggcggggctccgctgccccttcccagaggccgcgcctgctgctgagcagatgcagtagccgaaactgcgcggaggcacagaggccggggagagcgttctgggtccgagggtccaggtaggggttgagccaccatctgaccgcaagctgcgtcgtgtcgccggttctgcaggcaccatgagccaggacaccgaggtggatatgaaggaggtggagctgaatgagttagagcccgagaagcagccgatgaacgcggcgtctggggcggccatgtccctggcgggagccgagaagaatggtctggtgaagatcaaggtggcggaagacgaggcggaggcggcagccgcggctaagttcacgggcctgtccaaggaggagctgctgaaggtggcaggcagccccggctgggtacgcacccgctgggcactgttgctgctcttctggctcggctggctcggcatgcttgctggtgccgtggtcataatcgtgcgagcgccgcgtttgtcgccaagctaaccggcgcagaaagttggttggcacacggggcgccctctaaccgcatcggcgaacctttaaggcctttccaggggcaacggcgcggggcaaacttggccgggtctttaaaggggcgtctcnattaacttgaaactctcttgaaaggttaaaanggccttttttt

SEQ ID NO: 22 - DNA, 5975 bp, Homo sapiens
  misc_feature: Incyte ID No: 348196.89
  unsure 4001-4197: a, t, c, g, or other
atctcttaaagctatggccttgaaaccagcctgggtaacaaaaccaagcccttgtatctaaaaaacaaaagggcaggtagattccagataaataatgttgcaggaagggggtgataaaatacagaaatgtgatacacagcaaaccctcaactgctgtttcattggctcccagtgtcttaatctgtgtctgctaacactttaaggtacatctgaaataccccccaaacccagaaagcttttcaacagctaggttgtccaagaacttggaaaattcaccttctgatgtcctccaagacagattcctgcagaggtaaaaaaaaaagttcttattggattggaaaatacaaatgaacacaatatttaacactatgtaacctaggagcaaaaggttgctattataaaatcagttaaatatttaaacagatacctaccattttttatacaccttatttgctcagacctggaaaaaataaaaccaatgttttcaacaagtgatgattactccctttctctgtatagaaatctttatcatccctcagacagttccttctggaacaaatcttcctcttctcccccagccagtcccagtggttcacctttacaggctctgggactaggacagagagtaagacatgtgaaagtttcttcattgggaatttttagcatagtccaccttacatttaggtttactcacctgtaacttcagcctggagtgaacacagacacctagttttcctgcaaaatcaagaaagaaaaatgtagtcttgagagactttcattctatgtcacattttacaatctctcaattgtatctattgcttggcagaaagaagtttcagggcacattttataggaaacactacttagcccaagaacttcctattggctgtaaagctcctcaaataacttgcaatttttagaacatgtcactggaaggcaggctcacagctcagaaaatacctttcagtcacacattgatcagactggggcggtattcaactcatcactggtgagcagcaattcatcactggtggttcaggagatcaaagactttgggttaagccagttatgtctgtgtacattcacccagaccacagtgctatcacacacaaaaatcacagaaaattttatatagcagccattgatggtaactattgcaaagccatttacctcaaactcctcttgggctttagagagaaggtgctggccctgaaagaggaagaccaagtcagtagtgcttctcatatcccgcattatgttgttcccacccatcattctcagaaaatcagatttcagagtctcaacagcaagtcatcagccgaacgagattccatgtaagtcatcacaaacacaggcctaaaaaggcactttttcctaccctatatactgagtgcattgaataccgtgaaattactcacctttgagccaagcaggttattggttagtagtacctagagaaaaacaaagctgtgggtgaaagattcctcagacatggttaccccccactccctgcgttctccagtttctcaggtgttcatgtattttcactgtcggtcatagtgagctagtttgattcatcatagaaactgcctacttggtggcataagctgtaaggaacaaaaaatatcaactaacctctcagctctgaaggcttttcaatggtatatagcaacaagctgctcctgaatcaaaaaatcattcaattagctaattatcccaaacagccaaaactattttagttacggttgctaatggacaaactaagaaaaggtaaccaaatgtctcagacaattccttatggaataagctctcatgccctcttcatgttaaccctggtgagttcacaattactggttcccaggctaaaacaggggtaaggcaggatgtttcctcctcattggagcagaatcctggaaagctacaactgacaagcattcgtctgaccctgggcagatcagtgggcatctatctgagaaaaaaggggcatatatcagtgggcatctatctagaaacatcactacagagaacaagaggaaccagaaaactttatgggttaagcaggctttggtaacaaatatcaaaatggctaagttatctattagagaataggcccatagaattcgaaaaaccaaacttactgtaagatagaggcagactgtcatcaggaatacctggaaaggaaagcaaattagttattttaaggtattaggatggaatgaagcttattcataaacaacaactgccatcagaactctaacatgctattaacttttgtacctcacagaacatcagcttatcaattcaaatcatctgacagtaacgtgatcgatatatggatgagggtaacagcacacccttacaagaactgtagtaccgggttgcgatctccctccccagaaaatcatttcaagaggaacaagatggaaggcgccaaaaaacattgttccgccggccacttgttttcttgaacatttacaaagatgacatacaccaatttggataattacctgtattcaccctgggaggcagctgaattccccaggatagattatgagatgctgtagacaacagaggaaagcattttatgtacctaaaaatagtcattcaaagaccccttaagacctctctctcacttctcagtagtaagatgacatcacttgaaagttcagccatatgcttgtcattttgtgttcatcatggagtggttatctacaaggtctcctctgtaagagcataaaccatgtacacctacctggaacattactgtaacgctggctttgcataaagatgggtcttgtcccattccttcaccagtaagctcttgtgggctgaacatctgaaaaaataacacccttcactaacacctcagacaaatcaatagggccctgacatttgttgcgtacagtacagtgctactcagaattttctgttttctccactaatccatcagaaagagagagttcagttcgtaaaatcatccccgtagcaacttccacacactcaacgaaagagcagagattaagaaatggccgtaagaacttactgcaacaacagagctctcttcggttccaacgtgcgcgtaaatcctgcagacaggagcccaataagacattaggtcaactcagggcatttcgaaaacgctattttctgaacagacggctaagaaggaggcttgcagggcccatctcctcagagttacttatcctcacggagctcagtacaggtctgtgaaaaggtcctcatcataggaagggggacctacacggcccgccatcgccattttgtccttcacaaagccccactgctacttttaagcctcgaggccacgcacaagaccttatccgccagtcgccctggccagacagctacaacacagaaggcatagtgcgtgctatgctatgttcgcacaatcgctcaaaagaaaataaaagaaaaagacaaagtacaaaagagtaacagctataaagaccacgaagccacttaccacgagcagtagaaaaatgagaacgaatctccccggggagacgattaaataccatgccggcaggggcccacgggatttgggggcggggctacggcgagcgcacgcgcatacgttgaccgcatgcgaccccggggagttgtgggtagagagttccagggaaggagggcgtagacaaagcgccacctgaacttgcggcgcgaaaaaggcgcgcatgcgtcctacgggagcgtgctggctcaccgaccgcattgcggcttggttttctcacccagtgcatgtggcaggagcggtgagatcactgcctcacggcgatcctggactgacggtcacgactgcctaccctctaaccctgttctgagctgccccttgcccacacaccccaaacctgtgtgcaggatccgcctccatggagctacagcctcctgaagcctcgatcgccgtcgtgtcgattccgcgccagttgcctggctcacattcggaggctggtgtccagggtctcagcgcgggggacgactcnnnnnnnnnnnnnnnnnnnnnnnnnnnnnnnnnnnnnnnnnnnnnnnnnnnnnnnnnnnnnnnnnnnnnnnnnnnnnnnnnnnnnnnnnnnnnnnnnnnnnnnnnnnnnnnnnnnnnnnnnnnnnnnnnnnnnnnnnnnnnnnnnnnnnnnnnnnnnnnnnnnnnnnnnnnnnnnnnnnnnnnnnnnnnnnnnnnnntgagccaggacaccgaggtggatatgaaggaggtggagctgaatgagttagagcccgagaagcagccgatgaacgcggcgtctggggcggccatgtccctggcgggagccgagaagaatggtctggtgaagatcaaggtggcggaagacgaggcggaggcggcagccgcggctaagttcacgggcctgtccaaggaggagctgctgaaggtggcaggcagccccggctgggtacgcacccgctgggcactgctgctgctcttctggctcggctggctcggcatgcttgctggtgccgtggtcataatcgtgcgagcgccgcgttgtcgcgagctaccggcgcagaagtggtggcacacgggcgccctctaccgcatcggcgaccttcaggccttccagggccacggcgcgggcaacctggcgggtctgaaggggcgtctcgattacctgagctctctgaaggtgaagggccttgtgctgggtccaattcacaagaaccagaaggatgatgtcgctcagactgacttgctgcagatcgaccccaattttggctccaaggaagattttgacagtctcttgcaatcggctaaaaaaaagagcatccgtgtcattctggaccttactcccaactaccggggtgagaactcgtggttctccactcaggttgacactgtggccaccaaggtgaaggatgctctggagttttggctgcaagctggcgtggatgggttccaggttcgggacatagagaatctgaaggatgcatcctcattcttggctgagtggcaaaatatcaccaagggcttcagtgaagacaggctcttgattgcggggactaactcctccgaccttcagcagatcctgagcctactcgaatccaacaaagacttgctgttgactagctcatacctgtctgattctggttctactggggagcatacaaaatccctagtcacacagtatttgaatgccactggcaatcgctggtgcagctggagtttgtctcaggcaaggctcctgacttccttcttgccggctcaacttctccgactctaccagctgatgctcttcaccctgccagggacccctgttttcagctacggggatgagattggcctggatgcagctgcccttcctggacagcctatggaggctccagtcatgctgtgggatgagtccagcttccctgacatcccaggggctgtaagtgccaacatgactgtgaagggccagagtgaagaccctggctccctcctttccttgttccggcggctgagtgaccagcggagtaaggagcgctccctactgcatggggacttccacgcgttctcggctgggcctggactcttctcctatatccgccactgggaccagaatgagcgttttctggtagtgcttaactttggggatgtgggcctctcggctggactgcaggcctccgacctgcctgccagcgccagcctgccagccaaggctgacctcctgctcagcacccagccaggccgtgaggagggctcccctcttgagctggaacgcctgaaactggagcctcacgaagggctgctgctccgcttcccctacgcggcctgacttcagcctgacatggacccactacccttctcctttccttcccaggccctttggcttctgatttttctcttttttaaaaacaaacaaacaaactgttgcagattatgagtgaacccccaaatagggtgttttctgccttcaaataaaagtcacccctgcatggtgaagtcttccctctgcttctctcat

SEQ ID NO: 23 - DNA, 2598 bp, Homo sapiens
  misc_feature: Incyte ID No: 1136856.23
ggcacgagggtggctgcggggcaattgaaaaagagccggcgaggagttccccgaaacttgttggaactccgggctcgcgcggaggccaggagctgagcggcggcggctgccggacgatgggagcgtgagcaggacggtgataacctctccccgatcgggttgcgagggcgccgggcagaggccaggacgcgagccgccagcggcgggacccatcgacgacttcccggggcgacaggagcagccccgagagccagggcgagcgcccgttccaggtggccggaccgcccgccgcgtccgcgccgcgctccctgcaggcaacgggagacgcccccgcgcagcgcgagcgcctcagcgcggccgctcgctctccccatcgagggacaaacttttcccaaacccgatccgagcccttggaccaaactcgcctgcgccgagagccgtccgcgtagagcgctccgtctccggcgagatgtccgagcgcaaagaaggcagaggcaaagggaagggcaagaagaaggagcgaggctccggcaagaagccggagtccgcggcgggcagccagagcccagccttgcctccccaattgaaagagatgaaaagccaggaatcggctgcaggttccaaactagtccttcggtgtgaaaccagttctgaatactcctctctcagattcaagtggttcaagaatgggaatgaattgaatcgaaaaaacaaaccacaaaatatcaagatacaaaaaaagccagggaagtcagaacttcgcattaacaaagcatcactggctgattctggagagtatatgtgcaaagtgatcagcaaattaggaaatgacagtgcctctgccaatatcaccatcgtggaatcaaacgagatcatcactggtatgccagcctcaactgaaggagcatatgtgtcttcagagtctcccattagaatatcagtatccacagaaggagcaaatacttcttcatctacatctacatccaccactgggacaagccatcttgtaaaatgtgcggagaaggagaaaactttctgtgtgaatggaggggagtgcttcatggtgaaagacctttcaaacccctcgagatacttgtgcaagtgcccaaatgagtttactggtgatcgctgccaaaactacgtaatggccagcttctacaagcatcttgggattgaatttatggaggcggaggagctgtaccagaagagagtgctgaccataaccggcatctgcatcgccctccttgtggtcggcatcatgtgtgtggtggcctactgcaaaaccaagaaacagcggaaaaagctgcatgaccgtcttcggcagagccttcggtctgaacgaaacaatatgatgaacattgccaatgggcctcaccatcctaacccaccccccgagaatgtccagctggtgaatcaatacgtatctaaaaacgtcatctccagtgagcatattgttgagagagaagcagagacatccttttccaccagtcactatacttccacagcccatcactccactactgtcacccagactcctagccacagctggagcaacggacacactgaaagcatcctttccgaaagccactctgtaatcgtgatgtcatccgtagaaaacagtaggcacagcagcccaactgggggcccaagaggacgtcttaatggcacaggaggccctcgtgaatgtaacagcttcctcaggcatgccagagaaacccctgattcctaccgagactctcctcatagtgaaaggtatgtgtcagccatgaccaccccggctcgtatgtcacctgtagatttccacacgccaagctcccccaaatcgcccccttcggaaatgtctccacccgtgtccagcatgacggtgtccatgccttccatggcggtcagccccttcatggaagaagagagacctctacttctcgtgacaccaccaaggctgcgggagaagaagtttgaccatcaccctcagcagttcagctccttccaccacaaccccgcgcatgacagtaacagcctccctgctagccccttgaggatagtggaggatgaggagtatgaaacgacccaagagtacgagccagcccaagagcctgttaagaaactcgccaatagccggcgggccaaaagaaccaagcccaatggccacattgctaacagattggaagtggacagcaacacaagctcccagagcagtaactcagagagtgaaacagaagatgaaagagtaggtgaagatacgcctttcctgggcatacagaaccccctggcagccagtcttgaggcaacacctgccttccgcctggctgacagcaggactaacccagcaggccgcttctcgacacaggaagaaatccaggccaggctgtctagtgtaattgctaaccaagaccctattgctgtataaaacctaaataaacacatagattcacctgtaaaactttattttatataataaagtattccaccttaaattaaacaatttattttattttagcagttctgcaaatagaaaacaggaaaaaaacttttataaattaaatatatgtatgtaaaaatgtgttatgtgccatatgtagcaattttttacagtatttc

SEQ ID NO: 24 - DNA, 1700 bp, Homo sapiens
  misc_feature: Incyte ID No: 1136856.25
gcgcctgcctccaacctgcgggcgggaggtgggtggctgcggggcaattgaaaaagagccggcgaggagttccccgaaacttgttggaactccgggctcgcgcggaggccaggagctgagcggcggcggctgccggacgatgggagcgtgagcaggacggtgataacctctccccgatcgggttgcgagggcgccgggcagaggccaggacgcgagccgccagcggcgggacccatcgacgacttcccggggcgacaggagcagccccgagagccagggcgagcgcccgttccaggtggccggaccgcccgccgcgtccgcgccgcgctccctgcaggcaacgggagacgcccccgcgcagcgcgagcgcctcagcgcggccgctcgctctccccatcgagggacaaacttttcccaaacccgatccgagcccttggaccaaactcgcctgcgccgagagccgtccgcgtagagcgctccgtctccggcgagatgtccgagcgcaaagaaggcagaggcaaagggaagggcaagaagaaggagcgaggctccggcaagaagccggagtccgcggcgggcagccagagcccagccttgcctccccgattgaaagagatgaaaagccaggaatcggctgcaggttccaaactagtccttcggtgtgaaaccagttctgaatactcctctctcagattcaagtggttcaagaatgggaatgaattgaatcgaaaaaacaaaccacaaaatatcaagatacaaaaaaagccagggaagtcagaacttcgcattaacaaagcatcactggctgattctggagagtatatgtgcaaagtgatcagcaaattaggaaatgacagtgcctctgccaatatcaccatcgtggaatcaaacgagatcatcactggtatgccagcctcaactgaaggagcatatgtgtcttcagagtctcccattagaatatcagtatccacagaaggagcaaatacttcttcatctacatctacatccaccactgggacaagccatcttgtaaaatgtgcggagaaggagaaaactttctgtgtgaatggaggggagtgcttcatggtgaaagacctttcaaacccctcgagatacttgtgcaagtgcccaaatgagtttactggtgatcgctgccaaaactacgtaatggccagcttctacagtacgtccactccctttctgtctctgcctgaataggagcatgctcagttggtgctgctttcttgttgctgcatctcccctcagattccacctagagctagatgtgtcttaccagatctaatattgactgcctctgcctgtcgcatgagaacattaacaaaagcaattgtattacttcctctgttcgcgactagttggctctgagatactaataggtgtgtgaggctccggatgtttctggaattgatattgaatgatgtgatacaaattgatagtcaatatcaagcagtgaaatatgataataaaggcatttcaaagtctcacttttattgataaaataaaaatcattctactgaacagtccatcttctttatacaatgaccacatcctgaaaagggtgttgctaagctgtaaccgatatgcacttgaaatgatggtaagttaattttgattcagaatgtgttatttgtcacaaataaacataataaaaggagttcagatgtttttcttcattaacc

SEQ ID NO: 25 - DNA, 1348 bp, Homo sapiens
  misc_feature: Incyte ID No: 101575.1
ggtgtatttggattctcccggggccccgccccctcctccctccttgcagagccggcgccggaggagacgcacgcagctgactttgtcttctccgcacgactgttacagaggtctccagagccttctctctcctgtgcaaaatggcaactcttaaggaaaaactcattgcaccagttgcggaagaagaggcaacagttccaaacaataagatcactgtagtgggtgttggacaagttggtatggcgtgtgctatcagcattctgggaaagtctctggctgatgaacttgctcttgtggatgttttggaagataagcttaaaggagaaatgatggatctgcagcatgggagcttatttcttcagacacctaaaattgtggcagataaagattattctgtgaccgccaattctaagattgtagtggtaactgcaggagtccgtcagcaagaaggggagagtcggctcaatctggtgcagagaaatgttaatgtcttcaaattcattattcctcagatcgtcaagtacagtcctgattgcatcataattgtggtttccaacccagtggacattcttacgtatgttacctggaaactaagtggattacccaaacaccgcgtgattggaagtggatgtaatctggattctgctagatttcgctaccttatggctgaaaaacttggcattcatcccagcagctgccatggatggattttgggggaacatggcgactcaagtgtggctgtgtggagtggtgtgaatgtggcaggtgtttctctccaggaattgaatccagaaatgggaactgacaatgatagtgaaaattggaaggaagtgcataagatggtggttgaaagtgcctatgaagtcatcaagctaaaaggatataccaactgggctattggattaagtgtggctgatcttattgaatccatgttgaaaaatctatccaggattcatcccgtgtcaacaatggtaaaggggatgtatggcattgagaatgaagtcttcctgagccttccatgtatcctcaatgcccggggattaaccagcgttatcaaccagaagctaaaggatgatgaggttgctcagctcaagaaaagtgcagataccctgtgggacatccagaaggacctaaaagacctgtgactagtgagctctaggctgtagaaatttaaaaactacaatgtgattaactcgagcctttagttttcatccatgtacatggatcacagtttgctttgatcttcttcaatatgtgaatttgggctcacagaatcaaagcctatgcttggtttaatgcttgcaatctgagctcttgaacaaataaaattaactattgtagtgtgaaa

SEQ ID NO: 26 - DNA, 275 bp, Homo sapiens
  misc_feature: Incyte ID No: 276310.1
  unsure 24, 131, 226, 232, 236, 239, 244: a, t, c, g, or other
gggctgcctgtctgggcgcacccncacggagccgtgcccccttcacctttgtgaaggaaattaacctcctgctattgagctccggtcgcggccaatctggacgcaaaagagacgcgtgctggacggggggngggggggcaatctgtactctgaggcaggctgaggcctccgagaggacaagccgcctcccctgtgccaccaggaagagacaacagcgaagattccncccgcncctnacnccacncccacctccgctgccgttccgtttggaccca

SEQ ID NO: 27 - DNA, 1899 bp, Homo sapiens
  misc_feature: Incyte ID No: 014284cB1
atttcaaggcgcgcgcctcgtggtggactcaccgctagcccgcagcgctcggcttcctggtaattcttcacctcttttctcagctccctgcagcatgggtgctgggccctccttgctgctcgccgccctcctgctgcttctctccggcgacggcgccgtgcgctgcgacacacctgccaactgcacctatcttgacctgctgggcacctgggtcttccaggtgggctccagcggttcccagcgcgatgtcaactgctcggttatgggaccacaagaaaaaaaagtagtggtgtaccttcagaagctggatacagcatatgatgaccttggcaattctggccatttcaccatcatttacaaccaaggctttgagattgtgttgaatgactacaagtggtttgccttttttaagtataaagaagagggcagcaaggtgaccacttactgcaacgagacaatgactgggtgggtgcatgatgtgttgggccggaactgggcttgtttcaccggaaagaaggtgggaactgcctctgagaatgtgtatgtcaacacagcacaccttaagaattctcaggaaaagtattctaataggctctacaagtatgatcacaactttgtgaaagctatcaatgccattcagaagtcttggactgcaactacatacatggaatatgagactcttaccctgggagatatgattaggagaagtggtggccacagtcgaaaaatcccaaggcccaaacctgcaccactgactgctgaaatacagcaaaagattttgcatttgccaacatcttgggactggagaaatgttcatggtatcaattttgtcagtcctgttcgaaaccaagcatcctgtggcagctgctactcatttgcttctatgggtatgctagaagcgagaatccgtatactaaccaacaattctcagaccccaatcctaagccctcaggaggttgtgtcttgtagccagtatgctcaaggctgtgaaggcggcttcccataccttattgcaggaaagtacgcccaagattttgggctggtggaagaagcttgcttcccctacacaggcactgattctccatgcaaaatgaaggaagactgctttcgttattactcctctgagtaccactatgtaggaggtttctatggaggctgcaatgaagccctgatgaagcttgagttggtccatcatgggcccatggcagttgcttttgaagtatatgatgacttcctccactacaaaaaggggatctaccaccacactggtctaagagaccctttcaacccctttgagctgactaatcatgctgttctgcttgtgggctatggcactgactcagcctctgggatggattactggattgttaaaaacagctggggcaccggctggggtgagaatggctacttccggatccgcagaggaactgatgagtgtgcaattgagagcatagcagtggcagccacaccaattcctaaattgtagggtatgccttccagtatttcataatgatctgcatcagttgtaaaggggaattggtatattcacagactgtagactttcagcagcaatctcagaagcttacaaatagatttccatgaagatatttgtcttcagaattaaaactgcccttaattttaatatacctttcaatcggccactggccatttttttctaagtattcaattaagtgggaattttctggaagatggtcagctatgaagtaatagagtttgcttaatcatttgtaattcaaacatgctatattttttaaaatcaatgtgaaaacatagacttatttttaaattgtaccaatcacaagaaaataatggcaataattatcaaaacttttaaaatagatgctcatatttttaaaataaagttttaaaaataaaaaa

SEQ ID NO: 28 - DNA, 279 bp, Homo sapiens
  misc_feature: Incyte ID No: 272599.1
gaaaaaaaccccacaaccatgttataggaaaagttagtataaatgacatagcataattaatatattcaaaataacttttaaaaagttgtcttgtagcttgaagggatcctaaatatcaaaagcccatcacaaacttacaagccttactgctacgtaaatatccctttgaactagtttctggttctatttaaaaagtcgaaaacagttgaaattaatttacgaataagaacagatacacactttgtggggaggctgaggtggtaggatctcctgagccca

SEQ ID NO: 29 - DNA, 758 bp, Homo sapiens
  misc_feature: Incyte ID No: 1383712.24
catagtaatctacatatgtttaaagcatggacaagaagtttcagctgagccccaggaagttacagggttgcccttagctgagatgtgcatagatctgcaggggtgaatatgtttggaggagtttgggaatgtcacttttattgtaaataattaattaattaatttttgaggaagacgcggtcgtaagggctgaggatttttggtccgcacgctcctgctcctgactcaccgctgttcgctctcgccgaggaacaagtcggtcaggaagcccgcgcgcaacagccatggcttttaaggataccggaaaaacacccgtggagccggaggtggcaattcaccgaattcgaatcaccctaacaagccgcaacgtaaaatccttggaaaaggtgtgtgctgacttgataagaggcgcaaaagaaaagaatctcaaagtgaaaggaccagttcgaatgcctaccaagactttgagaatcactacaagaaaaactccttgtggtgaaggttctaagacgtgggatcgtttccagatgagaattcacaagcgactcattgacttgcacagtccttctgagattgttaagcagattacttccatcagtattgagccaggagttgaggtggaagtcaccattgcagatgcttaagtcaactattttaataaattgatgaccagttgttaacttctgttggtttttattcagaatactggcagatttaggaatataaaggtgtactatgagacttccacttttcaggtg

SEQ ID NO: 30 - DNA, 1548 bp, Homo sapiens
  misc_feature: Incyte ID No: 1820861cB1
gtaactatcgcttggctgcttctagggggttgctactgcgcccgctacacaaacgctcatgttctctgaagacttgcagcaaggcttgctgaggctcacagaagatagccccagtgttttggagtggttttgaatgtgattctgagatcagactgactgagctggaatcctggctttatatcttaccagctacacaaccttggagtcttagaaattttttcttttcaataagcagtcatccttactttccctcaagatgacaaacagttcgttcttctgcccagtttataaagatctggagccattcacgtattttttttatttagttttccttgttggaattattggaagttgttttgcaacctgggcttttatacagaagaatacgaatcacaggtgtgtgagcatctacttaattaatttgcttacagccgatttcctgcttactctggcattaccagtgaaaattgttgttgacttgggtgtggcaccttggaaactgaagatattccactgccaagtaacagcctgcctcatctatatcaatatgtatttatcaattatcttcttagcatttgtcagcattgaccgctgtcttcagctgacacacagctgcaagatctaccgaatacaagaacccgggtttgccaaaatgatatcaaccgttgtgtggctaatggtccttcttataatggtgccaaatatgatgattcccatcaaagacatcaaggaaaagtcaaatgtgggttgtatggagtttaaaaaggaatttggaagaaattggcatttgctgacaaatttcatatgtgtagcaatatttttaaatttctcagccatcattttaatatccaattgccttgtaattcgacagctctacagaaacaaagataatgaaaattacccaaatgtgaaaaaggctctcatcaacatacttttagtgaccacgggctacatcatatgctttgttccttaccacattgtccgaatcccgtataccctcagccagacagaagtcataactgattgctcaaccaggatttcactcttcaaagccaaagaggctacactgctcctggctgtgtcgaacctgtgctttgatcctatcctgtactatcacctctcaaaagcattccgctcaaaggtcactgagacttttgcctcacctaaagagaccaaggctcagaaagaaaaattaagatgtgaaaataatgcataaaagacaggattttttgtgctaccaactctggccttactggaccataaagttaattatagctttgaaagataaaaaaaaaaaaacaaaaaaaaactcagtatgaaaaaatacagttagctagcaaatatggacaggtttacttagaaatcctgtttctaaatgcaagtcaagctttattgttaggcttgctgctactcattaacccaaatatttgtacaaaaaactaaagagtctcattgaacgaatgtaaaatcctgcaatatccttgaaatccaaaagaggtccatgacatagacccaaaggtattcatgagttattcatttaaatgcctg

SEQ ID NO: 31 - DNA, 1509 bp, Homo sapiens
  misc_feature: Incyte ID No: 330902.2
ctgcaatggggttgctactgctgcggctaaccaaacagctcatgcttctctgaagacttgcagcaaggcttgctgaggctcacagaagatagccccagagtcttagaaattttttcttttcaataagcagtcatccttactttccctcaagatgacaaacagttcgttcttctgcccagtttataaagatctggagccattcacgtattttttttatttagttttccttgttggaattattggaagttgttttgcaacctgggcttttatacagaagaatacgaatcacaggtgtgtgagcatctacttaattaatttgcttacagccgatttcctgcttactctggcattaccagtgaaaattgttgttgacttgggtgtggcaccttggaagctgaagatattccactgccaagtaacagcctgcctcatctatatcaatatgtatttatcaattatcttcttagcatttgtcagcattgaccgctgtcttcagctgacacacagctgcaagatctaccgaatacaagaacccggatttgccaaaatgatatcaaccgttgtgtggctaatggtccttcttataatggtgccaaatatgatgattcccatcaaagacatcaaggaaaagtcaaatgtgggttgtatggagtttaaaaaggaatttggaagaaattggcatttgctgacaaatttcatatgtgtagcaatatttttaaatttctcagccatcattttaatatccaattgccttgtaattcgacagctctacagaaacaaagataatgaaaattacccaaatgtgaaaaaggctctcatcaacatacttttagtgaccacgggctacatcatatgctttgttccttaccacattgtccgaatcccgtataccctcagccagacagaagtcataactgattgctcaaccaggatttcactcttcaaagccaaagaggctacactgctcctggctgtgtcgaacctgtgctttgatcctatcctgtactatcacctctcaaaagcattccgctcaaaggtcactgagacttttgcctcacctaaagagaccaaggctcagaaagaaaaattaagatgtgaaaataatgcataaaagacaggattttttgtgctaccaattctggccttactggaccataaagttaattatagctttgaaagataaaaaaaaaaaaaacaaaaaaaaactcagtatgaaaaaatacagttagctagcaaatatggacaggtttacttagaaatcctgtttctaaatgcaagtcaagctttattgttaggcttgctgctactcattaacccaaatatttgtacaaaaaactaaagagtctcattgaacgaatgtaaaatcctgcaatatccttgaaatccaaaagaggtccatgacatagacccaaaggtattcatgagttattcatttaaatgcctggaactgacttcttgataaaaatataaaagataatttccatgtaagttaccagaaagcccaccagc

SEQ ID NO: 32 - DNA, 826 bp, Homo sapiens
  misc_feature: Incyte ID No: 211881.1
cttaaaacctgacatccttcatgttagctaacctttataatctctttggatgtagtaaatttttagtattttttagattgaatttgtatcatatttgctagcaaattgagtataaagagtagcatatttttactacagatgtattattttaactaacaaaggcatattatacatttttttcatatataaactttggaataggattttacagtaacttaagttttttatttctacccatgtgtcaaagttttatgctaaattctgaatagaatagttgtaactcccactctgggtattttatttattttaaacagttctagtattgtttcctgtgaattttttccagggattgctactttctgcactattcattagaccaagagcatttcaccaaatacttaaaacttaaaaatttttaaacttttccaaatttgattaaaaggataacatattctaaaggtattcaatatttttacttatctctgaaaaacttaatcacataaaagcatacattttacacatacagctctctccatcttccacaatagattaagacataaaacataaccagtatttttgaaaagcccccttaactggcatgcttcttactgaaattatcataaaaggttcgtatgagaaaggattccagaatatcccttaattgtgttgtagcttatgcatttctatttattttatacattatttaattcatgtgagttacttacctggcagggaagatatgatcaccaaggtgcctttcacattcattgcactctggatgtgctgacccctgcaatttccccaaatgggggaagctcaactgcat

SEQ ID NO: 33 - DNA, 1102 bp, Homo sapiens
  misc_feature: Incyte ID No: 399161.1
caggcgggagcaccgtgcctggcccagatggatttttaaatatcacctgttcatattgtttaaaatagatacaactaaaacagctttgaggcatacaggaactctacagataaggaggaccatttcataatgataaagggcttatctcaccaagaaggcagtcacacttacgtttttatgtatttgttgaagagtcccaatgtatttaaagcaaaaataagcaactacaaagagaaagatacaaatccatgatcaaagtgaggaattttcacacacatcgtagtaactgatggaatgagtcaatgaaaaattagtgaggaaatagaagatttggacagcacaacaaatggcctaggagaacatttagaatgttgccttcgatgcttaagaatacatattcttttcaaaagaaaacacagaacagcctggcaggagagataccatcatcatgaaggtgattttcccagagctgggcttatccattgcattctggatgtgctgacgcctgtggttttcccaaatgtgggaaactggactgcataatttgtggtagtgggggactatgttcgtgttctctcctggtgtttaaaattaaaaaaaaaaaaactttattaaaggcacagaacattaataaaaattgacaataaactgggctattaagtaaattgcaacaatttccagaggtttgaaatgatacagagtatgttttctgaccacagtacagttaaactaggaatataacaaaaagataactagggatatgtgtggatattgcatacctctaagtaacccttgggatgagaaagaaattacaatggaaattagaaaatatcttgaataatgaaaatacaatatatgtaagcttgtagaattcagcttattaaatgcatattttagaaagaaggaaaggctgaaaatcagtgagcaaagccttccatctcaagaaatagaaaaagaatatagaaggaaggaattaatatttttaaagaagcactaatttacaagaataattaaatagaaaagaagttgtcattaggaaggatcaataaagctagaagcttgttatttgaaaagacttgtaaatgtggtaaatcacaagtaa

SEQ ID NO: 34 - DNA, 806 bp, Homo sapiens
  misc_feature: Incyte ID No: 138206.1
ctaaagatctattcttaatcagttttggctccctcttcttaaagaagcagaatacccaaaccctcccattccccttccctgatctattcttctcctttggtttccataccatgtatatatcgcagtgtgtattttgcttatgttgtctttcaattccaattaatgtggaagcgttgtgaacatagacagtaacagtagatgtacaagaaatacaggttgagtgagtgaatgagggccttccaacaacctgccagaattggaatcctagctccagtgtttactaggtgggcaacttgctgccattcagagaatgccaccaccctgcctggagaatggggcccctttccttgtgttgctgtgcagtaccaaatgatggacaccttcccatatgcagatgttttcacttactttttaacataatgaatccacaaacctctagcctggggacttaaaaatgtgctgctttagttaactctagtgtattatagaaactgctaattcttatattgtcattattagcttactaaccaaatcccttccataggttatacattctgtgagggtttggacatacatatgcctctcccgtcaccacagagcagtattcacatgcactgagtgctcaaatattcataggttgaaggaaaagggtagggagaacaaaggaaccatggaatcatccttcatggtaaataagcgaaagacagcatgtgaagcatcatctttttaatatctttgcgtatgttctttcttgatagtgtttgagtttaaaaagaatagccatcagtacacttgttcagtcaata

SEQ ID NO: 35 - DNA, 1073 bp, Homo sapiens
  misc_feature: Incyte ID No: 1241528.18
tagctgggacctggatttgcttcctttatcgtcgcaccatgcaggccgacctcgggggctacttcgccgcagcccgaggaatatggagcccgcaatgcctgctggccaaaactacagaccgtcgagccaaggaccaggttgaatctgtcactttccctgccatcgttttaggagcggctccgggcacttgcgagtgctcagaagcagctccgctttctcttcctgctctccatcatggcgcaggatcaaggtgaaaaggagaaccccatgcgggaacttcgcatccgcaaactctgtctcaacatctgtgttggggagagtggagacagactgacgcgagcagccaaggtgttggagcagctcacagggcagacccctgtgttttccaaagctagatacactgtcagatcctttggcatccggagaaatgaaaagattgctgtccactgcacagttcgaggggccaaggcagaagaaatcttggagaagggtctaaaggtgcgggagtatgagttaagaaaaaacaacttctcagatactggaaactttggttttgggatccaggaacacatcgatctgggtatcaaatatgacccaagcattggtatctacggcctggacttctatgtggtgctgggtaggccaggtttcagcatcgcagacaagaagcgcaggacaggctgcattggggccaaacacagaatcagcaaagaggaggccatgcgctggttccagcagaagtatgatgccgccttgtcaaagtggaacgctcggacactgcgcatgccgtcggtgatgagggtcagcacgtagatctcgccgcccttgagggagatgaccatcttgtcgtaggagatgaaggtggcctgggcgcagtccagggtgatccgcacaccctcctgggtgcgaagcgggaaagccgtggttccatgtggtgaggctgttgagagccacgccatacggggggacgctctggttcaggtacaacagcgagttgacggcaaaaacaacacccaactatgggcttgggcacagtcagagcctgggtgcagtcaaagggcaggctggtgagg

SEQ ID NO: 36 - DNA, 2941 bp, Homo sapiens
  misc_feature: Incyte ID No: 1091353.11
ctggcacacagtagctgcttagaaaagatttgatgagagggtgaccatacatgaggggaaattttcctcagtatcaaaacatgttgaaactcacacacttccaagatgacgtattctcaggtctcctgccgttgccgttctctgccgtatgtgatggtgttctgtcttaccagaggctgtggccctgagaaagatcacgtctacctgcagctgcaccacctacctccagagcagctggccacgcgcctgcctggcatttcagagacagccatgatcttcgctggcgtggacgtcacgaaggagccgatccctgtcctccccaccgtgcattataacatgggcggcattcccaccaactacaaggggcaggtcctgaggcacgtgaatggccaggatcagattgtgcccggcctgtacgcctgtggggaggccgctgtgcctcggtacatggtgccaacgctcggggcaaacctcgctcttggacctggttgtctttggtcgggcatgtgccctgagcatcgcagagtcgtgcaggcctggagataaagtccctccaattaaaccaaatgctggggaagaatctgtcacgaatgttgacaaattgagatttgctgatggaagaagcataagaacatcggaactgcgactcagcatgcagaagggctgctggctcgtgtcacgttcaccaccagaccccacatcaggagtcccgccaggggtgtggggaggcagtgctgcctggttggccgtggagccgtatggaacgtggtgcctcacaggcagtctgcttggcgtcctggaccctggctgtatcccgctggaaaggattcaacgcaaaatcatgctgccgtgttccgtgtgggaagcttgttgcaagaaggttgtgggaaaatcagcaagctctatggagaccggaagcatctgaagacgtttgaccggggaatggtctggaacacggacctggtggagaccctggagctgcagaacctgatgctatgtgcactgcaaaccgtcaatggagcagaggcggggaaggagtcacggggcgcgcacaccagggaagactacaaggtgcagattgatgagtatgatcactccaagcccatccaggggcaacagaagaagccctttgaggtgcactggaggaagcacaccctgtcctatgtggacgtcggcactgggaaggtcactgtggaatatagacccataattgacaaaactttgaacgaggctgactgtgccactgtccccccagccattcactcctactgatgagacaagatgtggtgatgacagaatcagctttttgcacagccagaggacaacacatcacacacaagaaacagttgtgctcatgtgatgggggcctcagcactaggaaggagtggactgttggcgcacgcagcagcttgaataaatctgaaagtcactacgctgcgtaagagaagccaaataaagcgcatgctgtgtacagagggtgtcgagaatgcctcctacgtgacggaaagcagatccgtggttccctgcagactggcaggagcagattccaaaggcacaggaagaagcttgcaggtagaatgtgttcattaccttctgcgcattataccacaaaaaagctgggaataaaaatgctaaccaaaaaaaaaggtgaaagtagataaaatttctcaactgtgtgatgggtaaacgtgcaggtttgctgtcatgctttgtttatgaagctgtggggtacaaggactctcatagtcactgtggaatgcagaacgttgcagcctcatggaagaggatttggcagcatctaacaaaatgacatggcatttgcccttagactcagcaattctagaatctgcctcaaaaaaaactctggcaaagaaatgaaaggactttacccacagagttcttttcacagcctgaatgtgtttgccacaaagttcttcactgtggcatttgtaaaactggaaacaatcaaaatgtccatcagtaggggattgggaacattaattcgtgcagtggggaactccgtaccagaaggaggaatgaggaacgcctattgataaggggcagagtacatatcatatgatgcaaatatatattgctttttcttaaaacagtacaaagataaaagtctaaagtggttgctgtggaggacaggggtcagtggtggaagtgagaccgaaatagactctgaagtaatatctggactttgaaattgttaagtgttttacatattaccaaactaagtttttaagatagtccctaaaattgaaagaatggtatctgaaatgaatgaatctaaattccttggattgcattctacaggctccaaccgtgagaccaaaatttggaaggtggccctgagcagcagctgaagggaagtgggaggtgagacaggaaagaggcggtggcatgcggcgtccgggagctgggtcccatgtgggcagctgggcccgtgctcactgtgggagctggtgtgttccttcaccagcccacactccacaggtttaggatggtcaattccgggcacccctggcctgctccaggacgtgctcctgccaccagagaaagcccctaggcagcgtcccaggtgctggtggtgtcagaatcgagtttgagtctgaggagtgacctggggctggctgggctaggcagcatcacggggttctgcagcccaactgcacatcaggctggtgacagtcacgcagcctattacctcatgtgtcatcagaggatcgctagaacacagcacttcaagtgtgcagatttagtgagccatagtctaaagacaaatagagccactgaatcctaaatttcaatcaatcatctccgttgctcatcttattggtattaatcctttgaaattatgtggggtgggagttaaagctaataactaattatgttaatgctaaaactaagatttttctggcaagggaaaatcctccca

SEQ ID NO: 37 - DNA, 3391 bp, Homo sapiens
  misc_feature: Incyte ID No: 405058.1
cccaggagtcactggattgatgatgtagaatatgctcaaaggccagtgctttatttggggaattcagggggctttctggtgcccaagacagtgacctgcagcaagggagtcagaagacagatgtagaaatcaagagtgaccatccacgggattgacttggattgccactcaagcggtcctctcatggaatgttggtgaggccctctgccagggaagcaatctggctgtgcaaagtgctgcctggtggggaggactcctggaaatctgactgacccctattccctgcttgggaacttgaggggtgtcagagcccctgatgtgctttctcttaggaagatgaggactctgaacacctctgccatggacgggactgggctggtggtggagagggacttctctgttcgtatcctcactgcctgtttcctgtcgctgctcatcctgtccacgctcctggggaacacgctggtctgtgctgccgttatcaggttccgacacctgcggtccaaggtgaccaacttctttgtcatctccttggctgtgtcagatctcttggtgccgtcctggtcatgccctggaaggcagtggctgagattgctggcttctggccctttgggtccttctgtaacatctgggtggcctttgacatcatgtgctccactgcatccatcctcaacctctgtgtgatcagcgtggacaggtattgggctatctccagccctttccggtatgagagaaagatgacccccaaggcagccttcatcctgatcagtgtggcatggaccttgtctgtactcatctccttcatcccagtgcagctcagctggcacaaggcaaaacccacaagcccctctgatggaaatgccacttccctggctgagaccatagacaactgtgactccagcctcagcaggacatatgccatctcatcctctgtaataagcttttacatccctgtggccatcatgattgtcacctacaccaggatctacaggattgctcagaaacaaatacggcgcattgcggccttggagagggcagcagtccacgccaagaattgccagaccaccacaggtaatggaaagcctgtcgaatgttctcaaccggaaagttcttttaagatgtccttcaaaagagaaactaaagtcctgaagactctgtcggtgatcatgggtgtgtttgtgtgctgttggctacctttcttcatcttgaactgcattttgcccttctgtgggtctggggagacgcagcccttctgcattgattccaacacctttgacgtgtttgtgtggtttgggtgggctaattcatccttgaaccccatcatttatgcctttaatgctgattttcggaaggcattttcaaccctcttaggatgctacagactttgccctgcgacgaataatgccatagagacggtgagtatcaataacaatggggccgcgatgttttccagccatcatgagccacgaggctccatctccaaggagtgcaatctggtttacctgatcccacatgctgtgggctcctctgaggacctgaaaaaggaggaggcagctggcatcgccagacccttggagaagctgtccccagccctatcggtcatattggactatgacactgacgtctctctggagaagatccaacccatgacacaaaacggtcagcacccaacctgaactcgcagatgaatcctgccacacatgctcatcccaaaagctagaggagattgctctggggtttgctattaagaaactaaggtacggtgagactctgaggtgtcaggagagccctctgctgctttccaacacacaattaactccgtttccaaatacattccagtgtattttctgtgttgttcatagtcaatcaaacagggacactacaaacatggggagccataagggacatgtctttggcttcagaattgtttttagaaatttattcttatcttaggatttaccaaatagggcaaagaatcaacagtgaacagcttcacttaaaatcaaatttttctgggaagaaaatgagatgggttgagtttgctgtatacaaacaggtgctaacactgttcccagcaaagttttcagattgtaaaggtaggtgcatgccttcataaattatttctaaaacattaattgaggcttacagtaggagtgagaaatttttttccagaattgagagatgttttgttgatattggttctatttatttattgtatatatggatatttttaatttatgatataataaatatatatttatcatatttaataggataaattaatgagttttatccaagaccttacaaccacatttctggccatttaactagcactttataagccaatgaagcaaacacacagactctgtgagattctaaatgttcatgtgtaacttctagaaacacagcagaaactgatagataagggaataaagttgaaatgattccttaaaattcatggacacagataaatgcaaggtgagaattgacaaatgctataaatgctttctttttctgaaaagattttgaaaaatttaaaaaagtatagctactactgtgttcaaaacgttttaaatgacaaatgactttcccaggggaatttgcagttctgtaaatatcttaaataaaagccaacttaagaagagcccagcattaaatttacgatcttaggtggtaatgaaaagtatatgctgctttgtatttatgtaaaataattggccctctccatcttttctcatttcatgtgtcaggtagtttttctgaaccacacaaatggctttcctggagagagatctgtagcacagacagtgggttacagcagccccactgagggaccaaactcaaaccctgcatttccatcttaccaggtcaaaccaaaccagtcagtggggctactttttatagtgctttaatctgaatttagagctgatttttaaaggagtctttaaatgttaatggtatactaactaacgaatagtgcctcattatcattcttgagtcagatacttctgttgatgggagaaacagaagaatccttccctttgggtgtgttgagctcccccaaagccatcagcatctcttttgacaaatgctagtcctttctctgtgctttggaatcaggttcctgcatcatcacccggactgtaaaaagtatcataagcctcccttgccagatgccaactcgtggggcatttcaacagagtttctttgaaatgtttacaacgtattcttcttgataagcaatgaacttaacatttagatgcaatccgtgaaaagaaaaaaaaatctgaaaaatatctcctgcatcaggtctgtgttatttatgtattgtgaatgttttcttaattttattggctgtatgctttcttacacataataaaaatattttgtg

SEQ ID NO: 38 - DNA, 258 bp, Homo sapiens
  misc_feature: Incyte ID No: 406573.9
ggaccagtagcaaaggagtgtgcagacttgtcctgtaatggcagatcctttcatctcgcctttattgttcactatgactcctgcattatcttcaaaataaaggcgagatgaaaggttctgccattacaggaccagtagcaaaggagtgtgcagacttgtggccccggattgcatccaatgctggcagcattgcatgattctccagtatatttgtaaaaaataaaaaaaaactaaacccattaaaaagtatttgtttgc

SEQ ID NO: 39 - DNA, 1172 bp, Homo sapiens
  misc_feature: Incyte ID No: 3365683cB1
ccgcaccctcctcactccttgcagagccggcgccggaggagacgcacgcagctgactttgtcttctccgcacgactgttacagaggtctccagagccttctctctcctgtgcaaaatggcaactcttaaggaaaaactcattgcaccagttgcggaagaagaggcaacagttccaaacaataagatcactgtagtgggtgttggacaagttggtatggcgtgtgctatcagcattctgggaaagtctctggctgatgaacttgctcttgtggatgttttggaagataagcttaaaggagaaatgatggatctgcagcatgggagcttatttcttcagacacctaaaattgtggcagataaagattattctgtgaccgccaattctaagattgtagtggtaactgcaggagtccgtcagcaagaaggggagagtcggctcaatctggtgcagagaaatgttaatgtcttcaaattcattattcctcagatcgtcaagtacagtcctgattgcatcataattgtggtttccaacccagtggacattcttacgtatgttacctggaaactaagtggattacccaaacaccgcgtgattggaagtggatgtaatctggattctgctagatttcgctaccttatggctgaaaaacttggcattcatcccagcagctgccatggatggattttgggggaacatggcgactcaagtgtggctgtgtggagtggtgtgaatgtggcaggtgtttctctccaggaattgaatccagaaattggaactgacaatgatagtgaaaattggaaggaagtgcataagatggtggttgaaagtgcctatgaagtcatcaagctaaaaggatataccaactgggctattggattaagtgtggctgatcttattgaatccatgttgaaaaatctatccaggattcatcccgtgtcaacaatggtaaaggggatgtatggcattgagaatgaagtcttcctgagccttccatgtatcctcaatgcccggggattaaccagcgttatcaaccagaagctaaaggatgatgaggttgctcagctcaagaaaagtgcagataccctgtgggacatccagaaggacctaaaagacctgtgactagtgagctctaggctgtagaaatttaaaaactacaatgtgattaactcgg

SEQ ID NO: 40 - DNA, 2041 bp, Homo sapiens
  misc_feature: Incyte ID No: 406992.1
  unsure 1923, 1998, 2026: a, t, c, g, or other
gtggtggaacgaggaggtggagaattgagagcacgatgcatacacaggtgtttctgagtagtaattagatcgctgtgaaggaaaaagcacacctttgagttttcacctgtgaacactatagcgctgagagagacagtctgaaagcagaggaagacatcgatcagtaacaccaagagacaccaaagttgaaagttttgttttctttccctctgttttatttttcccccgtgtgtccctactatggtcagaaagcctgttgtgtccaccatctccaaaggaggttacctgcagggaaatgttaaacgggaggctgccttccctgggcaacaaggagccacctgggcaggagaaagtgcagctgaagaggaaagtcactttactgaggggagtctccattatcattggcaccatcattggagcaggaatcttcatctctcctaagggcgtgctccagaacacgggcagcgtgggcatgtctctgaccatctggacggtgtgtggggtcctgtcactatttggagctttgtcttatgctgaattgggaacaactataaagaaatctggaggtcattacacatatattttggaagtctttggtccattaccagcttttgtacgagtctgggtggaactcctcataatacgccctgcagctactgctgtgatatccctggcatttggacgctacattctggaaccattttttattcaatgtgaaatccctgaacttgcgatcaagctcattacagctgtgggcataactgtagtgatggtcctaaatagcatgagtgtcagctggagcgcccggatccagattttcttaaccttttgcaagctcacagcaattctgataattatagtccctggagttatgcagctaattaaaggtcaaacgcagaactttaaagacgccttttcaggaagagattcaagtattacgcggttgccactggctttttattatggaatgtatgcatatgctggctggttttacctcaactttgttactgaagaagtagaaaaccctgaaaaaaccattccccttgcaatatgtatatccatggccattgtcaccattggctatgtgctgacaaatgtggcctactttacgaccattaatgctgaggagctgctgctttcaaatgcagtggcagtgaccttttctgagcggctactgggaaatttctcattagcagttccgatctttgttgccctctcctgctttggctccatgaacggtggtgtgtttgctgtctccaggttattctatgttgcgtctcgagagggtcaccttccagaaatcctctccatgattcatgtccgcaagcacactcctctaccagctgttattgttttgcaccctttgacaatgataatgctcttctctggagacctcgacagtcttttgaatttcctcagttttgccaggtggctttttattgggctggcagttgctgggctgatttatcttcgatacaaatgcccagatatgcatcgtcctttcaaggtgccactgttcatcccagctttgttttccttcacatgcctcttcatggttgccctttccctctattcggacccatttagtacagggattggcttcgtcatcactctgactggagtccctgcgtattatctctttattatatgggacaagaaacccaggtggtttagaataatgtcagagaaaataaccagaacattacaaataatactggaagttgtaccagaagaagataagttatgaactaatggacttgagatcttggcaatctgcccaaggggagacacaaaatagggatttttacttcattttctgaaagtctagagaattacaactttggtgataaacaaaaggagtcagttatttttattcatatattttagcatattcgaactaatttctaagaaatttagttatanctctatgtagttatagaaagtgaatatgcagttattctatgagtcgcacaattcttgagtctctgatacctaccnattggggttaggagaaaagactagacanttactatgtggtcat

SEQ ID NO: 41 - DNA, 973 bp, Homo sapiens
  misc_feature: Incyte ID No: 399626.1
tttgaagtactcacgtgaagactttgtgttggtgtgttcagagtctctgggcagagaaaaacacccactccgctacagtcctatcctgcttttgagagcctgtttgcaggttctagcaggggagcactcgtatatccttgaccaaagaccagtcctcctctctcagggatggtcgtcttcaatcgagcatgcagcttcgggacagatgcatgtggagcggtgagggaggaaggggacacccacctagtcagccagatcagccaaatcaaccctggtgatcaatggggtgacagatgtcacagccagatggccctatcctgcttttgaagaccatgtagtcctcctcagtttgcttctttccttctccatatccagttttgtcgtcaagttaggttctttttgaagagttagttgtacagtggtcagatttgttcaacttttggataagcctttggggatgttggggttagattagtggctttggttttttgtttttgaccttcacccagtacagtaaagtggaaaaccttgtggccatcttctttttcatattttcccaccttttagtttttgtgtgcacatgttaagctttgtagtgttgccaaatactttgtgtcagcctgactccttagtagtatatggatctaaaccaaatttattgaaaatttcagtttatgagtaccattcagtagcccttagtcatatgtatgaataaggaatgtgtagttttatagaaaggattttcatttttggttcagtttgtgacctgtgaggaatatccttagagctgctgatgtaaatttggagaatcctcgagttagaaaagtagggataagaaaacttgtctaccttctccatgtcctttgatggggccaaaaaggaaaaagaagagtggtggtggttggtgtagtttgtcttttcagtcttacgggaaacaatgttccatgggtggtcctttgtaagcctatggagg

SEQ ID NO: 42 - DNA, 257 bp, Homo sapiens
  misc_feature: Incyte ID No: 474725.3
cttgggtgatggggcacggaagagggttacaggcaaagggaccagcgtttctaaactcttggagacacagtgaagaaggttcatacctggagtgccaaggttactgtgtctccagaaacacatatggacctcacaaaggacgagtggggacttcttgatgaggctcagagactcctgtaccttgaagtgatgctggagaactttgcccttgtagcctcactgggttgtggccatggaacagaggatgaagagacacc

SEQ ID NO: 43 - DNA, 1687 bp, Homo sapiens
  misc_feature: Incyte ID No: 402460.13
gcccccaccactctcctcccagcagccctgcagcacacatccctgcatctgtcccgagagccccagccctgcaggcatctgggcctgaatgccaggcagctggtccaccctgcagccatgctgcacgtctgactgagaactgagcaccagataaagaagcattggtccttgtcagcctctctgacttttgcagttagggctgcatccattttaaatactgtagaaaaataagccatctctcggacgctaggagacccgccagagtctgccccgcgtggagagggataaacagctcctctgaagtagctgcagacggctcttccaaccccgccccaacaggccccggggcctcagaggatgctgcgccaggctgcgaagctgaggggctgggagagctggcagcagagatcccaccgctgtatctttgggtcgcatcaacagtccttctgcaggcatgcctccagcatcccacgttctgttgccatgacacctgggaccctggtgctcgctgggccagctttggaccctccagcctcaccctcggtctcatgcccacggccaagtatacacaggcagaactccccagcactgtttccaggtccctgggggggcccaggtgggcactgaagcagggcctagtccaggggttcctgcttgattcgaacagcagtgggggtgggctgcggccgccgctcctcccggcaaagcacatactcgctgaactgggaggagtccacaccgcccccacaggacgcagccacgctgaaacccctctggaacagccgctccaggacctgcccaggaagaaacagaggtcatcaaggccaagctgcaagaggacacctggcttggcctggcagggaggtgggtgcctgctggggcagccagcaagggcaccttctcctgtgacgatctcagtcttgctcactgacaaaggtccctacagaaccacgtgctgggttccaccaccagagggacagaagtggccaggcccagtgacccctcaggttagcaaacctagttggacgaccccacccaggccaccatcctgctgccctcagggccttgattccgggaggcaaaaagaggctttgggtcccttctttattctgtagggtgtaacctatgccctctctccagacacatggccccaagtgtcctccctgagtcctgccccaataatggagagttccctgtccttcagcctctaggcatccaccagcttccctgagctgtgcattccaggtggtttgaagcctgggggtgcatcagctcgtgggagctctggagggagagaaaaaggagaagtcctctcaatatttgagtctctgcaggcgtccacaactatgtgggtttgtgcctctgtgagggtgaggtctgatgactgcgtgtaacacccgtctcctgcaactagcaagttctgaccgacaggctgtggaatgcgtgcacagggggccctcttccctgcaaagcccattccaccctaacccggaaatgtgccaagctcttgggtctgcgaagagctgttggaaaataggccctcactccatctgagctgtccaattcttggacccatccaggaagagccggtccagggattctcttggcagctggtgggtgcctgcgactcccaggtcagcagggagagggaaggggctccagaccacctttccactcagcctctgtc

SEQ ID NO: 44 - DNA, 630 bp, Homo sapiens
  misc_feature: Incyte ID No: 038033.1
atggcaggattttgtggttggaaatatggaaacttctgccgatttggaggtgtaggaggttgactattggatgtctttaggaagcatagcctttactttggctgttttggtaacccctgacccttctatcgcaatgggacttctatgctggtgggaattccacactttctgccctagacaattagggtctgccatgagtcccccactctgctgagggtgtgttctaaaaatgaactaatattattagtcattattgatattcaaatccaatttgtccaaatagatcattagcactctgagacctgggttccctcctagctcctgtgacatctatcagagtgattaaatagcagatgctcagtaaatatttgttggtggcaaatacatacttggcaacctccagtgactttacctggacagtaaaataattgcttgaatgcataacccaactttgaggtgagcctgcaggagctgctgaggcacacctgtgtgttgggctctcaaggcagccagaggtgagtcggcagctgagatcacgctccagggattcctgcgtcctttaataagattctggggtgggcacagttctggggtggacatggtgctcacgcccataatcccagaactttg

SEQ ID NO: 45 - DNA, 1296 bp, Homo sapiens
  misc_feature: Incyte ID No: 208075.1
gaagttttactatgtttaataatttagtgaaatttgggctatgtgtttattgattcagctcaatccagaggaaaattttaaaggcttacagccttaggattataggatactatataatacttttggtacagagatagaattaaataacataaaaatcaaaaatttattaggctaaaattttgagggagaagtggtatgaaaatacaaattcaaggagtaaaaggaaaagtggggcattccttgctactaaaaattgccttgttccaggtaagactgatcataaaaaaatggccctgttcataaaatttttaaaaagatcatagtatctatcaaataacttatattaagaacctcctgggctaaatttaaaaagtaatacaacagttttatttaaacatgtagtgtctacggtatgccagcactttgcagctatttataatgagaaattttagatgtcaatatagcaatgtgcaagaagatagagattttcaaaattcacttaagagtatctgagcataaaatgttaagattgctgatcggatgtgagggctatctggctgcgacatctgtcaccccattgatcgccagggttgattcggctgatctggctggctacgtgggtgtccccttcctacctcaccgctccatgtgcgtccctcccgaagctgcgcgctccgtcgaagaggacgaccaaccccgatagaggaggaccggtcttcggtcaagggtatacgagtagctgcgctcccctgctggaacctccaaacaagctctcaagattgctgatctagggccactaagtgatgaagcaaaaaggatggctaaaaaggacctcaacccttttgactttaaaaggaaaatagcttaaccttcaacctgtgtgacatttaactttttgaacccaaccgtaaaagctatcttctaaccaacaaaaagttaataattacatttggaattatacagaattagaaaattggcatttaaaaatactcaataatttgtccctggtttttaattttcaaaatattttctttttgaagagccagattccagtgatcctgcctctcagaaatttccacatttcttatttttcattaggccttaagaagctgcatttgtaaacttgtgtttcattattaaagcttaatttattttttatataaatagtatgtgctttgtgtacatagagaattaagtgaatgagtcacacagatgttggctgttgttaatgtgaaaattaaacagctgtatcacattttgaaaaataaaagtttcatctgaatgaatatagcaaaa

SEQ ID NO: 46 - DNA, 1462 bp, Homo sapiens
  misc_feature: Incyte ID No: 3479061cB1
ccagttaagagggtgtcagatgccttttttttttttttttttttttttggctggtccctgttgattggtcagaagacagctcagctaaaaggggaagttgtctgggtggttgctttttttctgacgtctgttcctcaggctggaagaaatgagcagaaaacaagggatgagtactttttagagtatgtgcatgttacgtaatacctgtttctgggcaatgctgcttcttctgactcaacaaatggggagagcaaattgaaaatgcgtaaattggaaggcaagttctgaaattaaacgttgtactttggcctgatgttctgacctttaaggaagcaagagtttgtaaacttccaaatatttactattctgaactgccgtgtaaacctgacgtattcccaagtcaacataccagtataccaataggatgtgaataatgtgtgtgttgagtttaaaaccatagcagttttgctctggcaagtaatgaaagcgttctcgcttcctgagtgtgagctccagcagactgcagagtggccagtccacagttgtagcctgacttcagtgagttctgatgtgtgctttttgcaaatacatgttctcagaacagtgagatcatccagcagtggcctggactgcactcacataaaaatcatgagacagccatggctacttgtttctgtaatacatgcatgtgtgttttttaaaacctatgataggcctctgattctgcagctgcaacttttatggaatgttttccttctccacatctcatgtgatgctcttattacaggacacagcattgttggttttgccatgtactattttacctatgacccgtggattggcaagttattgtatcttgaggacttcttcgtgatgagtgattatagaggctttggcataggatcagaaattctgaagaatctaagccaggttgcaatgaggtgtcgctgcagcagcatgcacttcttggtagcagaatggaatgaaccatccatcaacttctataaaagaagaggtgcttctgatctgtccagtgaagagggttggagactgttcaagatcgacaaggagtacttgctaaaaatggcaacagaggagtgaggagtgctgctgtagatgacaacctccattctattttagaataaattcccaacttctcttgctttctatgctgtttgtagtgaaataatagaatgagcacccattccaaagctttattaccagtggcgttgttgcatgtttgaaatgaggtctgtttaaagtggcaatctcagatgcagtttggagagtcagatctttctccttgaatatctttcgataaacaacaaggtggtgtgatcttaatatatttgaaaaaaacttcattctcgtgagtcatttaaatgtgtacaatgtacacactggtacttagagtttctgtttgattcttttttaataaactactctttgatttaaaaaaaaa

SEQ ID NO: 47 - DNA, 600 bp, Homo sapiens
  misc_feature: Incyte ID No: 1454465.1
gaattcgtcactttttttttttctgtagctagtgtaaagatagttgtcatagaacttttgcttgcattgattggcttccaagatgcagtcaagtttactattttctgtttagtatattactagtttgaaagttctttttggaaacctacttgacttcagtgcttggcagttcatggaaaactaacttaatgttaacttattaatccgggttctgtctgctaaaacttatgtgactttcttgattaacacttcttttgaaacacttttcttctttctctttcagtcttggtctttgtaatgggaaaagaaggggtccatggaggcggattgaataagaaggcatactcaatggcaaaatacttgagagactctgggttctagctgctaggcagactgttaagtattaggggaaaattgctcttaaactttcctagctataagcttaagtcttaattctggaaattttattagcaatgcagggtgatggggtatgaacctgtgtctcctttgtatccctctgttggtggggaaaggtgtctttctttctgccctccccccccagaataattctgttcacttttgttttgtttccttgtgtac

SEQ ID NO: 48 - DNA, 581 bp, Homo sapiens
  misc_feature: Incyte ID No: 378186.29
ctgaaaagcggccagggtgaccctagctttccttttccggttgcggcgccgcgcggtgaggttgtctagtccacgctcggagccatgccgtccaagggtccgctgcagtcggtgcaggtcttcggacgcaagaagacagcgacagctgtggcgcactgcaaacgcggcaatggtctcatcaaggtgaacgggcggcccctggagatgattgagccgcgcacgctacagtacaagctgctggagccagttctgcttctcggcaaggagcgatttgctggtgtagacatccgtgtccgtgtaaagggtggtggtcacgtggcccagatttatgctatccgtcagtccatctccaaagccctggtggcctattaccagaaatatgtggatgaggcttccaagaaggagatcaaagacatcctcatccagtatgaccggaccctgctggtagctgaccctcgtcgctgcgagtccaaaaagtttggaggccctggtgcccgcgctcgctaccagaaatcctaccgataagcccatcgtgactcaaaactcacttgtataataaacagtttttgagggattttaaa

SEQ ID NO: 49 - DNA, 5398 bp, Homo sapiens
  misc_feature: Incyte ID No: 330836.4
gtaccggttatgtggtattgatgccacctgaacaactgctccaggatgctcgcagcttcttgcgggcactgggtaccctgctccacaccaacctgcgcattaagcgggactcccagggggaactcatggtgtacccctattatggtgagaagtcagctgctatgaagaaacagaggatgacacgcagatcccttcctggtgaacaagaacaggaggtggctggctctaaagtctttctggaaattgacaaccgccagtgtgttcaagactcagaccactgcttcaagaacacggatgcagcagcagctctcctggcctctcacgccatacaggggaccctgtcataccctcttgtgtctgtcgtcagtgaatccctgactccagaacgcactcagctcctctatctccttgctgttgctgttgtcatcattctgtttattattctgctgggggtaatcatggcaaaacgaaagcgtaagcatggctctctctggctgcctgaaggtttcactcttcgccgagatgcaagcaatcacaagcgtcgtgagccagtgggacaggatgctgtggggctgaaaaatctctcagtgcaagtctcagaagctaacctaattggtactggaacaagtgaacactgggtcgatgatgaagggccccagccaaagaaagtaaaggctgaagatgaggccttactctcagaagaagatgaccccattgatcgacggccatggacacagcagcaccttgaagctgcagacatccgtaggacaccatcgctggctctcacccctcctcaggcagagcaggaggtggatgtgttagatgtgaatgtccgtggcccagatggctgcaccccattgatgttggcttctctccgaggaggcagctcagatttgagtgatgaagatgaagatgcagaggactcttctgctaacatcatcacagacttggtctaccagggtgccagcctccaggcccagacagaccggactggtgagatggccctgcaccttgcagcccgctactcacgggctgatgctgccaagcgtctcctggatgcaggtgcagatgccaatgcccaggacaacatgggccgctgtccactccatgctgcagtggcagctgatgcccaaggtgtcttccagattctgattcgcaaccgagtaactgatctagatgccaggatgaatgatggtactacacccctgatcctggctgcccgcctggctgtggagggaatggtggcagaactgatcaactgccaagcggatgtgaatgcagtggatgaccatggaaaatctgctcttcactgggcagctgctgtcaataatgtggaggcaactcttttgttgttgaaaaatggggccaaccgagacatgcaggacaacaaggaagagacacctctgtttcttgctgcccgggaggggagctatgaagcagccaagatcctgttagaccattttgccaatcgagacatcacagaccatatggatcgtcttccccgggatgtggctcgggatcgcatgcaccatgacattgtgcgccttctggatgaatacaatgtgaccccaagccctccaggcaccgtgttgacttctgctctctcacctgtcatctgtgggcccaacagatctttcctcagcctgaagcacaccccaatgggcaagaagtctagacggcccagtgccaagagtaccatgcctactagcctccctaaccttgccaaggaggcaaaggatgccaagggtagtaggaggaagaagtctctgagtgagaaggtccaactgtctgagagttcagtaactttatcccctgttgattccctagaatctcctcacacgtatgtttccgacaccacatcctctccaatgattacatcccctgggatcttacaggcctcacccaaccctatgttggccactgccgcccctcctgccccagtccatgcccagcatgcactatctttttctaaccttcatgaaatgcagcctttggcacatggggccagcactgtgcttccctcagtgagccagttgctatcccaccaccacattgtgtctccaggcagtggcagtgctggaagcttgagtaggctccatccagtcccagtcccagcagattggatgaaccgcatggaggtgaatgagacccagtacaatgagatgtttggtatggtcctggctccagctgagggcacccatcctggcatagctccccagagcaggccacctgaagggaagcacataaccacccctcgggagcccttgccccccattgtgactttccagctcatccctaaaggcagtattgcccaaccagcgggggctccccagcctcagtccacctgccctccagctgttgcgggccccctgcccaccatgtaccagattccagaaatggcccgtttgcccagtgtggctttccccactgccatgatgccccagcaggacgggcaggtagctcagaccattctcccagcctatcatcctttcccagcctctgtgggcaagtaccccacacccccttcacagcacagttatgcttcctcaaatgctgctgagcgaacacccagtcacagtggtcacctccagggtgagcatccctacctgacaccatccccagagtctcctgaccagtggtcaagttcatcaccccactctgcttctgactggtcagatgtgaccaccagccctacccctgggggtgctggaggaggtcagcggggacctgggacacacatgtctgagccaccacacaacaacatgcaggtttatgcgtgagagagtccacctccagtgtagagacataactgacttttgtaaatgctgctgaggaacaaatgaaggtcatccgggagagaaatgaagaaatctctggagccagcttctagaggtaggaaagagaagatgttcttattcagataatgcaagagaagcaattcgtcagtttcactgggtatctgcaaggcttattgattattctaatctaataagacaagtttgtggaaatgcaagatgaatacaagccttgggtccatgtttactctcttctatttggagaataagatggatgcttattgaagcccagacattcttgcagcttggactgcattttaagccctgcaggcttctgccatatccatgagaagattctacactagcgtcctgttgggaattatgccctggaattctgcctgaattgacctacgcatctcctcctccttggacattcttttgtcttcatttggtgcttttggttttgcacctctccgtgattgtagccctaccagcatgttatagggcaagacctttgtgcttttgatcattctggcccatgaaagcaactttggtctcctttcccctcctgtcttcccggtatcccttggagtctcacaaggtttactttggtatggttctcagcacaaacctttcaagtatgttgtttctttggaaaatggacatactgtattgtgttctcctgcatatatcattcctggagagagaaggggagaagaatacttttcttcaacaaattttgggggcaggagatcccttcaagaggctgcaccttaatttttcttgtctgtgtgcaggtcttcatataaactttaccaggaagaagggtgtgagtttgttgtttttctgtgtatgggcctggtcagtgtaaagttttatccttgatagtctagttactatgaccctccccacttttttaaaaccagaaaaaggtttggaatgttggaatgaccaagagacaagttaactcgtgcaagagccagttacccacccacaggtccccctacttcctgccaagcattccattgactgcctgtatggaacacatttgtcccagatctgagcattctaggcctgtttcactcactcacccagcatatgaaactagtcttaactgttgagcctttcctttcatatccacagaagacactgtctcaaatgttgtacccttgccatttaggactgaactttccttagcccaagggacccagtgacagttgtcttccgtttgtcagatgatcagtctctactgattatcttgctgcttaaaggcctgctcaccaatctttctttcacaccgtgtggtccgtgttactggtatacccagtatgttctcactgaagacatggactttatatgttcaagtgcaggaattggaaagttggacttgttttctatgatccaaaacagccctataagaaggttggaaaaggaggaactatatagcagcctttgctattttctgctaccatttcttttcctctgaagcggccatgacattccctttggcaactaacgtagaaactcaacagaacattttcctttcctagagtcaccttttagatgataatggacaactatagacttgctcattgttcagactgattgcccctcacctgaatccactctctgctttattctctccatgtggcaacattctgtcagcctctttcatagtgtgcaaacattttatcattctaaatggtgactctctgcccttggacccatttattattcacagatggggagagcctatctgcatggacctctgtggaccacagcgtacctgcccctttctgccctcctgctccagccccacttctgaaagtatcagctactgatccagccactggatattttatatcctcccttttccttaagcacagtgtcagaccaaattgcttgtttctttttcttggactactttaatttggatcctttgggtttggagaaagggaatgtgaaagctgtcattacagacaacaggtttcagtgatgaggaggacaacactgcctttcaaactttttaccgatctcttagattttaagaactcttgaattgtgtggtatctaataaaagggaaggtaagatggataatcactttctcatttgggttctgaattggagactcagtttttatgagacacatcttttatgccacgtatagatcctcccctgctatttttggtttatttttattgttataaatgctttctttctttgactcctcttctgcctgcctttggggatagtttttttttctttttattgcttcctctgttttgttttaagcatcattttcttatgtgaggtggggaagggaaaggtatgagggaaagagagtctgagaattaaaatattttagtataagcaattggctgtgatgctcaaatccctaaaccacctctcaacaaaacattacacctttggttctgtattatgcaaaaattacaaattggcaaattcaataagaggatgcaatggatttgagcatcacagccaattgcttatactaaaatattttaattctcagactctctttccctcatacctttcccttccccacctcacataagaaatgatgcttaaaacaaaacagagg

SEQ ID NO: 50 - DNA, 3325 bp, Homo sapiens
  misc_feature: Incyte ID No: 330836.5
aaggtttggaatgttggaatgaccaagagacaagttaactcgtgcaagagcctggtcagtgtaaagttttatccttgatagtctagttactatgaccctccccacttttttaaaaccagaaaaaggtttggaatgttggaatgaccaagagacaagttaactcgtgcaagagccagttacccacccacaggtccccctacttcctgccaagcattccattgactgcctgtatggaacacatttgtcccagatctgagcattctaggcctgtttcactcactcacccagcatatgaaactagtcttaactgttgagcctttcctttcatatccacagaagacactgtctcaaatgttgtacccttgccatttaggactgaactttccttagcccaagggacccagtgacagttgtcttccgtttgtcagatgatcagtctctactgattatcttgctgcttaaaggcctgctcaccaatctttctttcacaccgtgtggtccgtgttactggtatacccagtatgttctcactgaagacatggactttatatgttcaagtgcaggaattggaaagttggacttgttttctatgatccaaaacagccctataagaaggttggaaaaggaggaactatatagcagcctttgctattttctgctaccatttcttttcctctgaagcggccatgacattccctttggcaactaacgtagaaactcaacagaacattttcctttcctagagtcaccttttagatgataatggacaactatagacttgctcattgttcagactgattgcccctcacctgaatccactctctgtattcatgctcttggcaatttctttgactttcttttaagggcagaagcattttagttaattgtagataaagaatagttttcttcctcttctccttgggccagttaataattggtccatggctacactgcaacttccgtccagtgctgtgatgcccatgacacctgcaaaataagttctgcctgggcattttgtagatattaacaggtgaattcccgactcttttggtttgaatgacagttctcattccttctatggctgcaagtatgcatcagtgcttcccacttacctgatttgtctgtcggtggccccatatggaaaccctgcgtgtctgttggcataatagtttacaaatggttttttcagtcctatccaaatttattgaaccaacaaaaataattacttctgccctgagataagcagattaagtttgttcattctctgctttattctctccatgtggcaacattctgtcagcctctttcatagtgtgcaaacattttatcattctaaatggtgactctctgcccttggacccatttattattcacagatggggagaacctatctgcatggacctctgtggaccacagcgtacctgcccctttctgccctcctgctccagccccacttctgaaagtatcagctactgatccagccactggatattttatatcctcccttttccttaagcacaatgtcagaccaaattgcttgtttctttttcttggactactttaatttggatcctttgggtttggagaaagggaatgtgaaagctgtcattacagacaacaggtttcagtgatgaggaggacaacactgcctttcaaactttttactgatctcttagattttaagaactcttgaattgtgtggtatctaataaaagggaaggtaagatggataatcactttctcatttgggttctgaattggagactcagtttttatgagacacatcttttatgccatgtatagatcctcccctgctatttttggtttatttttattgttataaatgctttctttctttgactcctcttctgcctgcctttggggataggtttttttgtttgtttatttgcttcctctgttttgttttaagcatcattttcttatgtgaggtggggaagggaaaggtatgagggaaagagagtctgagaattaaaatattttagtataagcaattggctgtgatgctcaaatccattgcatcctcttattgaatttgccaatttgtaatttttgcataataaagaaccaaaggtgtaatgttttgttgagaggtggtttagggattttggccctaaccaatacattgaatgtatgatgactatttgggaggacacatttatgtacccagaggcccccactaataagtggtactatggttacttccttgtgtacatttctcttaaaagtgatattatatctgtttgtatgagaaacccagtaaccaataaaatgaccgcatattcctgactaaacgtagtaaggaaaatgcacactttgtttttacttttccgtttcattctaaaggtagttaagatgaaatttatatgaaagcatttttatcacaaaataaaaaaggtttgccaagctcagtggtgttgtattttttattttccaatactgcatccatggcctggcagtgttacctcatgatgtcataatttgctgagagagcaaattttcttttctttctgaatcccacaaagcctagcaccaaacttctttttttcttcctttaattagatcataaataaatgatcctggggaaaaagcatctgtcaaataggaaacatcacaaaactgagcactcttctgtgcactagccatagctggtgacaaacagatggttgctcagggacaaggtgccttccaatggaaatgcgaagtagttgctatagcaagaattgggaactgggatataagtcataatattaattatgctgttatgtaaatgattggtttgtaacattccttaagtgaaatttgtgtagaacttaatatacaggattataaaataatattttgtgtataatttgttataagttcacattcatacatttatttataaagtcagtgagatatttgaacatgaatacttgatgttgttaatatgtatggcattagcagtctcatattgaccctagcatcttatttccattttccattattttgcagaaacttatcagtcacacatgcatagttataaatggtaacagttttttttaatgacttgaaatcttaggatatgcttctgctaagcagataaaggagccttgttcaagatctgcacagttaaggttttaacgtaatttagcattaattggttatgttcagaatgttttaattttatataaaacattttagtcttcatattgggttttataatggtggaagaataaaatgaatttgagagctaaggaatgatcacctgtgacaggccggcccactcaagagctcaagtttgccactttgcaaaactattttggga

SEQ ID NO: 51 - DNA, 2482 bp, Homo sapiens
  misc_feature: Incyte ID No: 410882.6
gcactggctgccggagggccgggagtcggcgcggggctcgcgggcggtggccggaacgggtgccgggacggatcaccgtacggccgaacgcgacccgaggaggcggaagagcggcgccgtcactccatggattcctttgggcaacccagaccagaagataatcagtcagtagtcagaagaatgcaaaagaaatactggaaaactaaacaggtctttatcaaagcaacaggaaaaaaagaggatgagcacttggtggcgtctgatgctgaactggatgctaaacttgaggtttttcactctgttcaagagacatgcactgaacttctgaagataatcgagaaataccagctaagactcaatgttatatcagaggaagaaaatgagctagggctctttttaaaatttcaagcagaacgggatgcaactcaagctggcaaaatgatggatgccactggcaaggcactttgttcttcagccaagcaaagattggccctgtgtactcctctgtctcgtctgaagcaagaagtagcaacattcagtcaaagggcagtatctgataccttgatgacaattaatcggatggagcaggcacgcacagaatacagaggagctctactgtggatgaaagatgtatcccaagagctggacccagacaccttaaagcaaatggaaaagtttagaaaagtacagatgcaagtgagaaatagcaaagcttcttttgacaagttaaagatggatgtttgtcagaaagtggatttacttggagctagtcgctgcaatatgctatctcattcgctcactacctaccagagaacactgcttggattctggaagaaaacagctcgaatgatgtcccaaattcatgaagcctgtattggctttcatccgtatgattttgtagctctcaagcaactacaagacacgccaagcaagattagtgaagacaataaagatgaacaaataggcggttttcttactgaacagctcaataagctagttttgtctgatgaggaagcaagctttgagagtgaacaagcaaacaaagatcacaatgaaaaacattctcaaatgagagaatttggagcacctcagttttctaactctgaaaatgttgcaaaagatctacctgtagattcattggaaggagaagattttgagaaggaattctcatttctgaacaacctcctaagttctggttcttcaagtactagtgaatttacccaagaatgccagactgcctttgggagccccagtgccagtctcacatcccaggagccttccatggggtctgagcccctcgctcattcttctcgattccttccttcacaactctttgaccttggctttcatgtggctggagcgttcaacaactgggtctcccaagaggaatcagaactttgtctttcacacactgataaccagccagtgccttcacagagtccaaagaaattaacaagatcccccaacaatggcaaccaagacatgtcagcctggttcaatctgtttgcagacttggatccactttcaaacccagatgctattggacactcagatgatgaacttcttaatgcttgactgaagttataatgtcacttcagtggccttgagacatcaattttgcaacgtatttccttcgtggaaaggatttagattgtaacccgcacacaaaagcacggtgtttgtgaatataacacctgtcagccaactttagacagatggtaaagaccacatttgaataagtacacatctttcatatcttggatttgcagctgttggtactatgtggaaaatattagaaacttctatgtggaaaatattagaaactacagagtttgcgatatttagatactgaaatttatgtcaaaataacggctaggaataattctgtcaatatggagttgagcttatttctttggaaacccttttaagttgccttgctggctgtgagaattttatatgtggataacaaagatagatagatagcatgtaaattgggttgtggtttggggtcagtttttaaatgaaatagtagcgaggaggattttctgttttggaaaacaccattagaaccagaccagctttgttttgggttagagagagtaagatttgagaactcagtttgctttaatgaaatcacagagaaacttggtacttgtttttcttcatttggaggctaaaatgtaatgttttttcattcatacaaaataatggacactccctaattccattattaaatcttgaaggggaagtagcaggataattaatttgctaagcccatcctctgcagaaacagaaaaatctatcttcccatctcctaaaactcagaatgcacagtaatacttaaggcttgtacaagtgtcttcagacccactttttcatacacttgctatatagtagtatgcagtatttatattattcctgaaaataaaatgaggggagaatattccctaagcaactggcaatagtattcctgaaataccta

SEQ ID NO: 52 - DNA, 1248 bp, Homo sapiens
  misc_feature: Incyte ID No: 1405844cB1
cggggaagtcaggcagtggtttctgaaagccaagaacttagtagcactgtgccattctcttgcctgatccagtgccattcccttcacttgatatctgtttactttagaggaggcagtttttgagaaaggatcataaatatcctggcccagtgccccaggagctatgacaagcaaaggaacatacttgcctggagatagcctttgcgatatttaaatgtccgtggatacagaaatctctgcaggcaagttgctccagagcatattgcaggacaagcctgtaacgaatagttaaattcacggcatctggattcctaatccttttccgaaatggcaggtgtgagtgcctgtataaaatattctatgtttaccttcaacttcttgttctggctatgtggtatcttgatcctagcattagcaatatgggtacgagtaagcaatgactctcaagcaatttttggttctgaagatgtaggctctagctcctacgttgctgtggacatattgattgctgtaggtgccatcatcatgattctgggcttcctgggatgctgcggtgctataaaagaaagtcgctgcatgcttctgttgtttttcataggcttgcttctgatcctgctcctgcaggtggcgacaggtatcctaggagctgttttcaaatctaagtctgatcgcattgtgaatgaaactctctatgaaaacacaaagcttttgagcgccacaggggaaagtgaaaaacaattccaggaagccataattgtgtttcaagaagagtttaaatgctgcggtttggtcaatggagctgctgattggggaaataattttcaacactatcctgaattatgtgcctgtctagataagcagagaccatgccaaagctataatggaaaacaagtttacaaagagacctgtatttctttcataaaagacttcttggcaaaaaatttgattatagttattggaatatcatttggactggcagttattgagatactgggtttggtgttttctatggtcctgtattgccagatcgggaacaaatgaatctgtggatgcatcaacctatcgtcagtcaaacccctttaaaatgttgctttggctttgtaaatttaaatatgtaagtgctatataagtcaggagcagctgtctttttaaaatgtctcggctagctagaccacagttacctcctagacttatggaccacatttaagatttgagggatataggggaaatgatatgaatgtgtatttt

SEQ ID NO: 53 - DNA, 7400 bp, Homo sapiens
  misc_feature: Incyte ID No: 330933.15
ctcatctggctgccttctatgaggacaaaaagggggtgctccatgctggtcccggcagaggcagcagcctgccccctgtctactggctgccttccatccaccgatacatgtaccctgagatgaagatcacacacccagctggctgcatgtctcagtttataaagttctttggagaacagatcctcatcctctggaaatttgccttacttcgaaagcgcattttgatattttctcccccacctgtgggcgtggtgtgctatagagtgtactgctgctgctgcttggccaacgtttcactgcctggcatcgggggcaccattcctgagtccaaacctttcttctacgtgaacgtggctgacatcgagagcctggaggtagaggtgtcctatgtggcctgcaccacagagaagatattcgaggagaagcgggagctgtatgacgtctacgtggataaccagaatgtgaagacacaccacgaccacctgcagccgctgctgaagatcaacagtgctgacagggagaagtaccgccggctcaacgagcagaggcagatgctgttgtactcccaggaagtagaagaagactacaacccttgtgaagaggacctcttcgtgctgtttttcctagaacaaaacaaccggatatttcagactttgttggaggtgtctgccagtcaagacaaaactctgacagcagagcatgcccggggcatgggcctagacccccaagggaaagaccggagctttctcctggacctgctggaggcctatggcattgatgtcatgctggttatcgacaacccctgttgcccgtaggaggagccaacaggactgggagccgcttcacgtgggatgtcagcagcccggagttcaccccagggccccagagggcctcattttttattaagttgacacaaaggaatattgtttatactttccaacaaacataatttttgcaatttcctttctgcccttttccctagagataaggtgagatcaccttggttttgtgtcctgccatgttaggatattggaatctgccactttctcccagagctgctggtcctctgggcttggtcatgggagttgtatcactaggagtaggctgagctctggaaacattgggatggactgttcagaaagtctgtgtggtctttgtcccttgatgtatttgagaataagacaaccacctgtcccctgtggccttagatgttcatctgcctaaaggcagaaactagaccagatgatcttttaaggtttttagtagttctaggagtctatagtcttgggatcaaatcccttttcttgttcattagggcaactttatgtcttctctgtttacttgagtagggaccacaaagagggaaaaaaggatgtttctgacaccaaatatgagcttatcttatggtcagaatgaaagaggttgcttatcagtgagctgaaaactaaaattatagaatgaagcctggaaaccttcctcaaagtaacttgatggtggccatgcaatgtaatgttcctctttgtctgaaccttcctcttcttgggatgaattggtgaattgctaagggccaatgctggccttggagcttgcaagcaaattaattttccagtttagtctcttaagggttcaataatgctcttggagtaagttgggtatttttaaaggctgaagtttggactaccggaggatagagcaattgaagttcgagcaggatggagaagccactctaagtctcttcatctggacacgaattctctggaggcattagcagcagcacctctgggtcaacacagatttactggattccaaaatctagcaaggatctgagctggttaactcagagggtggagcatgatgctaacaagacggtttatcattttggacccctcacaaacacacttctctttagcagaggtgacattccttaggctaaataattggatccagggacataacagatttgttgagagaaaatgtggcagtgccttcacccgggacagtggtcaggaagccctgagcatccctgatggatttatccatcctcttctgaagtgctctgctctaggctgggtcctgttgccacctgcctgttctctggttggcttttgcaggagggcagcttacgtgtttgtcaaccagttagaaagccagttcctgtgggtcgagtttaggcctttttggccatagttgagaattttgacttgggatactgggttgttggtgacaaataatgtcttccttttcccccttcccgcctggctcggttatgggaatagccgtcagtgcatccatgtctgtgaccaacacccagccagactaatgtacacagcagggagaaataacattcaaatggtggttcacacatctcatctcaagataagattcttagggttcactgctttattcaaaagtgttttcactgtagctccttcatatggaatatcaaaactgaagaaattcacatgtggaaatgcaaatagacattgattaatcaaggtagcatctttatgtaaatatataaataagtttgggcattgaaatgtaaactgtacagctaatagacttttctcctctgcaatgtgggttgctgtcatttcagtaatgtgtatgtttacaaaagaaaaaaaaatctgtgtttcgaggttgaagcctcaccttttattctcctttacatgcaaccctctcttcttgcctctcaagggttgaggggtcctttctgtcaagtaatggttatttttcgtggtatcctgaggttcagggtgtgttaagctgggggtaggtggttagaggcaggagtagaagtgaaaggaaaggtctgattctcctagaggacacaagaagacctcctttttctggaattagggaatctgccggaaggagctgtttgaggcatttctgctctgagccttctatatgcaaacacctgcagttttaactgcaagctcagaagtgctggtgtaaacatagcagggtgagaatgaagttcctgttttttcctttgaatggtgagtcagggcttctgggttcccttaactttgtgcttgtctcggtagctttctgtctcacatctccacgtgtccaccctcctgctcatgcagagggccagggtatgggtggccccagaggagaacgtgccagtgaggcagtgccatgtttcaggtcataggggccttgggctcagctgaccccaatgcagaacttctccctttaagagagattccaataaattggtccttccctaccttgccagcttcttcataggaccagaaatcttgtgcagagcctctgcttggctgaacagcgtgtgctttatctcttcagttacctttgccactgttgagcatcctcagagtatgtcttgcctgggctatgaagtggagcctgtggcttcggaaatcacctttcgaagccttgctctatgccagattctgctccccaacatgacagattaacaggcacaacctaggatcctttgctaccagttctctactagggaattccacagtggcagcagaagctaggagccatgtggacctgcttttctgccagtcttgaaatattttctgagaaaccatctgcttttgttcagaagaaagtgctgaacatcgttcacagacttctaggtctgtaagctctttaggggcgggcattatgatgaccaccggcctcctggaggagggttggatacctgtggtgtgacaccttctgccaccatctcctgccgggcctcagccctcgcctgcctgagcaggcctagttctcctgtgaagctgtcagcctgatctcatgccacactgtgaaatgaactatgtgccagtttggaaatgattgctgacctgagatgctggctgggctgccctgttgttcctgaataagtcagaagaagttccaggtgggagtggaattcaggtttggggctcgttggtatccatgcaaaatatgacaaaggcctgttcaagagggcattttcaattctgtaggctcagcagatgatactgcccagcctttgggaaaatgtccagttggcccctggcttaggactctccacaaggagtttgaaatggtagggcttatcccctaccagactaaaagtatggcccaaattatgtgtttagaatttgcttggcctttaaacacgaaccattccctatgcctggtagagaccattccagtatcagtgtcccacctgggacctgtacagtcctcagtaaattatgattgcaatgaattagaaggcttttgccttccatatccatcatccattatagcatctgtgcttccacctggttagggggagggaagctgaaatcattgatgtatcaatagaagtaatttagcttaggaacttgcatctataacttaccttgttttgttccactttaaagtcaagacaagaaagttaagatagcacacaggtgcacatgcttccagatgccacatgtgaacatttgttgatcatgtgactaccgatgacactttagctagaagataaattaaatcttagctaaatcattgtttttccttctggtggctatgaggatgaatttgctctcagtcttgatgcactgaaagcccttcaaacacagtaaaagatgaaatcactcatctttaaactgaggccttcagggaagcttttgtaaaggacagtaatgaattaggctttcagttttaggacatcaaccctccgagaaaaggcagaaacccgagggaccatttatttcccttcgaaactgtatagcccagggaatggattgagatgctttctccagaccctgtataggtcaaccttgcagaggtaaaggaggaggggcaggtggatgaataaaataggataatgctcagcttggcagtggacttgccttagtgtgatgacaggtctaacatgggcaagacaattagaatggggaccaatatgccaggcatgggcttttatctccctagtagatcccaagctagtaggcttggattctgccaaatggccagccctcctgtcttctccccgtaccttgtagttagaccgaggtgagaatcctgctgaccccagtcccatcccctctcatttcaggaaaacccttttgtgattcaggtagggggagaggaggagttaagggctccgtttactcccaagtcatggatttttaatattccatttttatcactaatatacctctcttcctagaagctactggagtattgagtgttgtgggaaaaggctaactgtgaattaagttaatgtttttcttataagaaatggaagtttatttttttattgatattactatgtgatgaactgagtatgcatatactgaaatggaaggaaattttaaaactattattctagaagaaatgggcagttttgtaatttggtggtggctgagaccccatagaagttttactatgtaaataatttggagagtgaataaggagattgtgctatgaaatcctgacagcgctctttaggaggcagacttgacagtcctaggaaggttgacataaaaataccaaccttcagtaaagctctagtacaaaaaagggtaaatgtcatcattcttatttttaggcctctttcttgagagaggtgggagtgggaggtagtgttataactggcactttaatttgtttttggaactagaatttaggggcagttggatgaaattgcaaatttagaaggggaataagaattttctagtgctatataaagaaatgatgatggagacaaaagccttgctttcctctttttagaatttattttcgatttttagcatactgtggggcttttagagctaatatgatctaaattcagaaaatttaattttcatagtaggccaggtgtgaattacttatgtttgctatagaatgcttatttagactaacaataaatttactttgctttctaaggccagtcagcgaatgtggggatgaggcaggatgttttaaatgagccagagatgatccacaaagtgaacagtcgacacagaggtctttgagttggatggttgcaaatatattgacattagagtgaaaactccttcctttgggtaaactaaagaaagataaagtatactaaaaaattttaagatggtgttatacaaaaaaaagtttgggtctaacgtgtccacaaagactgtcaagtgaagaatggtggagattcttggtgtttgagcagccaacctggatgagtgacttcagggacagagcagaggaaagcaaaatgaatttcctttatttacccaaaacttgttgactgaatttttgtataggtccgggaaaataagcctaaacaaatagttgtagccttagaaaaactgttttcccatttctttctgagttagaatcagcatagcctccctgtcgccttaaatgtaaaaatcctattttgattaataccccagcctaagagttatagcaatacgagagactgaatctatttttgtttcgggtctttacctcatagtatgaaattagtaagacactgcatagattttgccctgaatactggtgtgcccaggtatgccgtgctctctctctgtttccagtggtggtaattttaaggcctaaagaaagctggggttaatcctgaagctaaaagtaaatgtttcttgaattgattttgttctgtggtacaaataacatctatgaatatcatatctgtatatatctgaaccaagttgtgtgcagagaggttgatataactatatttacagaaaatgatttttacaattaaagttcacattttaacatgaacgtgcgtgctgcaatcccttctccagtccgagaaatgtggtttgtggtaggaaggaatggtggcctactccatgagcagagcctgtgggggctgaacctgacttcacttacagtgatgatggaggagattggggagctgctacctgtccttctagaagccacggtctggacaaactttctccaggatcacagaagaactgcagcttcctggggagcagtttcacctccacaggcatcgcttcatactcctcactgtcaatgctaaaagagccccctgctccctggggagaagagaatattcagaacagctcaaacacatcagtggcctactggagttggaggtctcacagcagcaccagaagaagttcattatggaaaacaacatcctctcttgaggagctatcctaatgttcttttacaaaaaaaaattcagtgcctactacgatgggcacagtgctggttctggaaacatcctaattctaccatccatgaaaaaggatttattttctttttttggcccctatctcctcccagagtattttgggatttgaacaacatggttataattttcaaatatgtattacaaggcaagggcctgccatgtcttaaggaactcatatacatagtctttctatattatgctaatccttctcaaa

SEQ ID NO: 54 - DNA, 3427 bp, Homo sapiens
  misc_feature: Incyte ID No: 979182.3
gggccggctgaggagaagcgggccaggggcggggtcccagggggaggcgggagaactctggggagcccggggaggggccgaggagaacctccggaggtccggggaggagcgcggccggagcgggagaaggaggggggcgccgccgaggggttcccgccgagtccggaggggcgtcgccggcccgcgtcctgccactgtccccggcgcaccctccctctttgtccccaggcgcgcggctcccaaatcgggagggaaacggctcgggggtgtcctgggccgcggaggtgtcgggcgacggtcggggagcccggacagaagcggcgcgcactcggcggcgccccggcggtgccgacaactacccgggcggttaggggcgcagggcggagccgggccgcccctcgccgcccgggctcttcgcgggctgctctttgtctccccgacctcgatccctgcgtctccggcggcgtgcgggctcgtctgaggcttcccgcatctccccgctggaactcctgcctcccggggagggaatctggaaaaattgcaatcaaaacatcatttctctaagaaaattttgggtaaccgaagttctggacaacagggcataccaattcaatcaccatgagttggagcttcctgactcgcctgctagaggagattcacaaccattccacatttgtggggaagatctggctcactgttctgattgtcttccggatcgtccttacagctgtaggaggagaatccatctattacgatgagcaaagcaaatttgtgtgcaacacagaacagccgggctgtgagaatgtctgttatgatgcgtttgcacctctctcccatgtacgcttctgggtgttccagatcatcctggtggcaactccctctgtgatgtacctgggctatgctatccacaagattgccaaaatggagcacggtgaagcagacaagaaggcagctcggagcaagccctatgcaatgcgctggaaacaacaccgggctctggaagaaacggaggaggacaacgaagaggatcctatgatgtatccagagatggagttagaaagtgataaggaaaataaagagcagagccaacccaaacctaagcatgatggccgacgacggattcgggaagatgggctcatgaaaatctatgtgctgcagttgctggcaaggaccgtgtttgaggtgggttttctgatagggcagtattttctgtatggcttccaagtccacccgttttatgtgtgcagcagacttccttgtcctcataagatagactgctttatttctagacccactgaaaagaccatcttccttctgataatgtatggtgttacaggcctttgcctcttgcttaacatttgggagatgcttcatttagggtttgggaccattcgagactcactaaacagtaaaaggagggaacttgaggatccgggtgcttataattatcctttcacttggaatacaccatctgctccccctggctataacattgctgtcaaaccagatcaaatccagtacaccgaactgtccaatgctaagatcgcctacaagcaaaacaaggccaacacagcccaggaacagcagtatggcagccatgaggagaacctcccagctgacctggaggctctgcagcgggagatcaggatggctcaggaacgcttggatctggcagttcaggcctacagtcaccaaaacaaccctcatggtccccgggagaagaaggccaaagtggggtccaaagctgggtccaacaaaagcactgccagtagcaaatcaggggatgggaagacctccgtctggatttaatcctggcgggcttaaaacctgggcttttcatagtttatggtaagcagcagctcactgaataatgacttccattgagtaaacatttggctctggttatcttcagggatgctgttggctcatgatccaagctcaggggactctggaggcggggctgggctgagggagagaaagggaaacacagtgttcccaggcacatgttcttagcaataatacagttgcagaactttacatttgtgtcttccagatctggagaagaacagacatatttaaatcattcttgttgaacagtttttgtatgtacagtattatggtacttttttttttttagtatgagaactttttttgtatttgtacattgaactgctgtagttatacttttatattaaaggggaaaaagtccttataaataatgcctattaggctagtgctattactttgttcagcaaattctaccctggctttagaggtttttaatagatgctacacctaataaaagtgcctctcatattgcaggaacgatttcagatttttaaggagactgaagaggagataccagtttttagctcttggaaagcaagttcacagtagaaggaggttgagatcttctcttttatgtgagaaatctttgaatctcattcatgcgatcagagttgtagccaattttttgaaaacctttattttcaaaggaaataaatgattcactgtaggattcctttaaatatcaagcatcaccagtatatgctttgatggtatatgtatataacttaaagttctttcaaaagcctgatacagaaacgtgtccccagtttggtagcaatgtggaaaacctggctagagatgatatggagctgtccctcagaaagcaaagccatgcctggaatccctaataggctgcttagttgtgaacctgtttgatttgccttaagcctctatccagaaacctgcccgcttccgtctggttaagaagccagtggtggatattttctttgttaacattagaaatgcaaacattcccttgtcaaccaagaatactcaaagctacttgtattggaaatggcagaaggcctaaatccaaatttcttattttttataatttaccatagaagttttgtgattaaattcttacttctgccagtggaggtttatgcctgaaaggtcatggggtcctgtctgtaaatagacctaaagagaagtgcagtatttattctttgtaggcataatgtgtttgtcactgacaagcattcatgttcatcccactagtcttttattgcagtcttttattgtcattttcagccttatgttggagagctttgctttctcatcatgttcacattgtcttaagttttgtgagcttctgagaaagagcttggtaaaggtttaaaggggactttgttccaccagggagcattttatttgggcgtctcacccttttctaatgaaagctgttgtaagccacctctgacttggaaattctgaaagtatgaatattttttatatcttaattgtaaaatgccagttctccattatttagatgaatagtagaacactgcaccctttgtgcagtgtttttgtttctctactgcattcctacccccaccaaaaaaaagaaacttaagga

SEQ ID NO: 55 - DNA, 5989 bp, Homo sapiens
  misc_feature: Incyte ID No: 1382838.129
ccggccccgggacgcgagggggctgccaggggcgtccggttacatccccgccttcctctgtcctggccgcgggaccgggtttgcgggaccgcagttcgggaacatgttggcctcgagcagccggatccgggctgcgtggacgcgggcgctgctgctgccgctgctgctggcggggcctgtgggctgcctgagccgccaggagctctttcccttcggccccggacagggggacctggagctggaggacggggatgacttcgtctctcctgccctggagctgagtggggcgctccgcttctacgacagatccgacatcgacgcagtctacgtcaccacaaatggcatcattgctacgagtgaacccccggccaaagaatcccatcccgggctcttcccaccaacattcggtgcagtcgcccctttcctggcggacttggacacgaccgatggcctggggaaggtttattatcgagaagacttatccccctccatcactcagcgagcagcagagtgtgtccacagagggttcccggagatctctttccagcctagtagcgcggtggttgtcacttgggaatccgtggccccctaccaagggcccagcagggacccagaccagaaaggcaagagaaacacgttccaggctgttctagcctcctctgattccagctcctatgccattttcctttatcctgaggatggtctgcagttccatacgacattctcaaagaaggaaaacaaccaagttcctgccgtggttgcattcagtcaaggttcagtgggattcttatggaagagcaacggagcttataacatatttgctaatgacagggaatcaattgaaaatttggccaagagtagtaactctgggcagcagggtgtctgggtgtttgagattgggagtccagccaccaccaatggcgtggtgcctgcagacgtgatcctcggaactgaagatggggcagagtatgatgatgaggatgaagattatgacctggcgaccactcgtctgggcctggaggatgtgggcaccacgcccttctcctacaaggctctgagaaggggaggtgctgacacatacagtgtgcccagcgtcctctccccgcgccgggcagctaccgaaaggccccttggacctcccacagagagaaccaggtctttccagttggcagtggagacttttcaccagcagcaccctcaggtcatagatgtggatgaagttgaggaaacaggagttgttttcagctataacacggattcccgccagacgtgtgctaacaacagacaccagtgctcggtgcacgcagagtgcagggactacgccacgggcttctgctgcagctgtgtcgctggctatacgggcaatggcaggcaatgtgttgcagaaggttccccccagcgagtcaatggcaaggtgaaaggaaggatctttgtggggagcagccaggtccccattgtctttgagaacactgacctccactcttacgtagtaatgaaccacgggcgctcctacacagccatcagcaccattcccgagaccgttggatattctctgcttccactggccccagttggaggcatcattggatggatgtttgcagtggagcaggacggattcaagaatgggttcagcatcaccgggggtgagttcactcgccaggctgaggtgaccttcgtggggcacccgggcaatctggtcattaagcagcggttcagcggcatcgatgagcatgggcacctgaccatcgacacggagctggagggccgcgtgccgcagattccgttcggctcctccgtgcacattgagccctacacggagctgtaccactactccacctcagtgatcacttcctcctccacccgggagtacacggtgactgagcccgagcgagatggggcatctccttcacgcatctacacttaccagtggcgccagaccatcaccttccaggaatgcgtccacgatgactcccggccagccctgcccagcacccagcagctctcggtggacagcgtgttcgtcctgtacaaccaggaggagaagatcttgcgctatgctctcagcaactccattgggcctgtgagggaaggctcccctgatgctcttcagaatccctgctacatcggcactcatgggtgtgacaccaacgcggcctgtcgccctggtcccaggacacagttcacctgcgagtgctccatcggcttccgaggagacgggcgaacctgctatgatattgatgaatgttcagaacaaccctcagtgtgtgggagccacacaatctgcaataatcacccaggaaccttccgctgcgagtgtgtggagggctaccagttttcagatgagggaacgtgtgtggctgtcgtggaccagcgccccatcaactactgtgaaactggccttcataactgcgacataccccagcgggcccagtgtatctacacaggaggctcctcctacacctgttcctgcttgccaggcttttctggggatggccaagcctgccaagatgtggatgaatgccagccaagccgatgtcaccctgacgccttctgctacaacactccaggctctttcacgtgccagtgcaaacctggttatcagggagacggcttccgttgcgtgcccggagaggtggagaaaacccggtgccagcacgagcgagaacacattctcggggcagcgggggcgacagacccacagcgacccattcctccggggctgttcgttcctgagtgcgatgcgcacgggcactacgcgcccacccagtgccacggcagcaccggctactgctggtgcgtggatcgcgacggccgcgaggtggagggcaccaggaccaggcccgggatgacgcccccgtgtctgagtacagtggctcccccgattcaccaaggacctgcggtgcctaccgccgtgatccccttgcctcctgggacccatttactctttgcccagactgggaagattgagcgcctgcccctggagggaaataccatgaggaagacagaagcaaaggcgttccttcatgtcccggctaaagtcatcattggactggcctttgactgcgtggacaagatggtttactggacggacatcactgagccttccattgggagagctagtctacatggtggagagccaaccaccatcattagacaagatcttggaagtccagaaggtatcgctgttgatcaccttggccgcaacatcttctggacagactctaacctggatcgaatagaagtggcgaagctggacggcacgcagcgccgggtgctctttgagactgacttggtgaatcccagaggcattgtaacggattccgtgagagggaacctttactggacagactggaacagagataaccccaagattgaaacttcctacatggacggcacgaaccggaggatccttgtgcaggatgacctgggcttgcccaatggactgaccttcgatgcgttctcatctcagctctgctgggtggatgcaggcaccaatcgggcggaatgcctgaaccccagtcagcccagcagacgcaaggctctcgaagggctccagtatccttttgctgtgacgagctacgggaagaatctgtatttcacagactggaagatgaattccgtggttgctctcgatcttgcaatttccaaggagacggatgctttccaaccccacaagcagacccggctgtatggcatcaccacggccctgtctcagtgtccgcaaggccataactactgctcagtgaacaatggcggctgcacccacctatgcttggccaccccagggagcaggacctgccgttgccctgacaacaccttgggagttgactgtatcgaacagaaatgaagacaagagtgccttatttcctttccaagtatttcacagcaacactctacttgaagcaacttggtccagattgaaaagtgtcctctggctgagtggccactaggcccagacccagcccagcctgagccccaacaacaacttttccctcactgttccccaaaacatgcaccctggacttctctaatagaaaagtctccacccctacacaaggacagaaccctccacccctacccccaaccctcagacagacttatacacccctgagtgaggattacatgcccatcccagtgtcctaggaccttttcccaatactagccccccagtggtgaacagaacctcccaaatttgagttgcacccttccctgtggccttatgagctcagcctcgctttgaggtacccaccgtcctgtcagctccttgacctatgagctggggcctgactaggaaaagttgggagttaaggaggaaattagcattccttaatgttttgttttggtgctctgaatttcttctttattatagtcctatagttttactcctcagttcctcaccatcatcatcttgtctaagacccccattataatattcatgcgctgctttttcatcaaaacctaccctgtcctagagatctatgggcatttggtggatgataatgagcagcccctcccagatagaatgtcaatatttgagcagtaggatattggcatttgttagttaaaggcttaaatcaaaagaatgtccaatggtaggaatttcaaggtgtaggtcagatatttgagaataggggatttttttgatgtgccttaaattataccaaagattactaattattcctctttgcccaaaatacttgcatccaaggttctagtctctgttgctgtgctggtctttagccccactgcttgcactgatgtccctccttttcacggagacctatctgaggtacaggatggggctggcaccagatgatgtcccaccacagtccctcacctccggcctccacatgacagaaccaatttacactcaaccatgacctcacccctccttggtttctccctcgatctgtggccctttttggatgtattcttatctaacaacacaatccggaaagactgaattgaatatttatactaatggttcatatcctttattgctcaatgatctaattaaagggatcattgccacatttcatgtttatatttctacaatttgtttagaaaacatctcctgaccatatcagtagctcgtgttatctttttatcaactgcttcccagcgtcctaaaacaatagaaattttggattgaaaagttcagcataaggagtttgagtcagtaaaggatgggataaaggaatcgagatgattcaatgaaaagtatcacaaaaaagagattgatcaacaagagaaataaaaaagcccaagaggaagtggtaggggaaggaatttaagaacagcaataagtaaaactcttaagtaactccaaaaagaaaatggtacattttgccaaagaccacttatacttgagaacatggaagaatttgcctgatactctctttggggaaaagagtctctcctcttttcctcaaaccccagtacactcagcctctctgccccaccttctcctgactttgtcctcacttgcttctgcagtacattggaacctgaattgaaagaaagtcttccttgaataattggagtttgtcttgagaggcaaatatagccccaagaatcacaagattcgaggaccatgtaggtcttttacgtagcccaaatccataaattagtctcactttttgtatttatcgtttcatattaaaccctctatatcaaatgttcatcatgattttgtatgatttttataactattttattcattttattagatttattctaaaattttttaatggtaaattcttaaactgtggaaaccactgaaggtgcttattaactgttctcccagatttgtacaagtattggatgattccttgagtttacagctgtacaaatagtgtgggcagaacccagggcatgaagatccaaaagggcctggttcagctttttctccagggccatggcagctttcatggcgtctggggttttaccccactcatcttcagctggcttcttgatgtcctggaagaga

SEQ ID NO: 56 - DNA, 401 bp, Homo sapiens
  misc_feature: Incyte ID No: 898864.15
ggattaattaaaaaagtgattttggagccacacaagggtgtgatggccctgcctgcaggcaggtatttacctgccgggagagcctaactcgtggtcttcttctcttacctgtagttttccatgcttggtcagtttcccagctcccagcaagctagaagcagaagcatggggagtagggcttgagagcagcaagaagcgacacctgataggaatggggagacagaaaaaccagtcatatgtaacttaacgaaggggatatgttctgagagatgcattgtttggcgatgtcgttgtggtgtgaacaccatagaatgtactcacacagacctagatagcatagcctgctacaccctaggctgtgtggcatagcctgttgctcctgggctaaaacctgcacagca

SEQ ID NO: 57 - DNA, 1573 bp, Homo sapiens
  misc_feature: Incyte ID No: 033527.1
gaaggctgctcttctcacacactgctgaatctccggatctccgcaaggtcatagccagtcacagcaaaggagttgcctgaggaatcacaaaatcgagcaccacacagctgggtgtcggcgacacactcaccatgacagtgttccacctgggggagcagagggctcgtcagggcctgctgccccatgcttgggcccccccattccacccaccccatgacacatacctcaatgtagccactctctgggtttctgctcagcttccagatatgcacaaaggtgtcctcacctgcagagagtagctgtggaggaggaagagggggagtcagaatgccctgacgggacagctataagctggaatccccagtccaggtgccccaggggagggggctacactgagttgcaaagacaagcctgtggtgttctctcaacattccactgccaggaaaaagggtatgtaggtacagaggaggagacttaccttgcccacctcagaagccaggtccagggcgcagatggcccgggcatgggcattgatctggacatgtagatttcctgtagtggcctcatatagatgcacttgtccgttcccatagcctgctgctatgatcccctgccacagctgcacagaggggcacggaactctgcaagggtgacacccaactttgttttgcccagatcaaatcctactccccagcctgaagctatctcaggaagccctctaccctttctgcctcacctacccaaatcctggaatgcgggtcaataatgtgaattctggccctgaccgccagacacacagcaagcctgagtcatctgccgtcaccatgtcagccacacaatcctgaagggaaaggcaagatcaacccttccctttctcccctgctatggtcctgtatacagggcaggaggggaagggaggcagtgtgtgcatctttgcctctccagggaaagggcaaggtgtggagctctcactagctagacccatcagaaaccacccctaccaccagggttcccttgggaagcatgaactgctttccttgaatttcttcatggagtcccatcccccaataacattaggagggggtgcataattgcctcactggatggatgataaaactgaggccacagtgtcgtgaccttctggaggtctcgtagtgaaccagtcacagtcatgactagaccctgggcccctgcacccccaacaccaggcagccaacacaacctatgggcctagccctatgccaggtacaatggagaatatgaataagaaaatatacaccctgttctcaagaggtttgcaaattacttggggagacaagagttgtcttttgagggcagtgccaattcaggtttcagctaagagacatcagtgggagctagaatatggggaaggcttcctggagaggatggatggcactggagctgggcctgaataggtgggacttgccctagagaaggaagctgcacatttcagagctggaaagtatcttagaaaccatttgttccaactcctcatttcacatcagtattataaagtcttaattaactataaaatactacataaatgtaaagt

SEQ ID NO: 58 - DNA, 5379 bp, Homo sapiens
  misc_feature: Incyte ID No: 351122.2
  unsure 2728-2779: a, t, c, g, or other
ccatcagttacgatctgagacctgggtccatggctcagcctttgccctgtcaacttgttaccactgtggcctcatcagttgagagcggtgatgagtttctcctgattgtcctcgctcctccttcttccttaccaataacctgtattgtggtagacgtctgtggtatggttagggtgtgtttgtgtgcacctgagagctgtaaacctggtacattgggaaagttgggaaggatgagtcaggcaagtaccttcactgagccaaatctggtgctaatgcctttgtctgtctgttgcatgggcccaacatctgtaccacgcgaggtgtgagctcctgccagcagtgcctggctgtgagccccatgtgtgcctggtgctctgatgaggccctgcctctgggctcacctcgctgtgacctgaaggagaatctgctgaaggataactgtgccccagaatccatcgagttcccagtgagtgaggcccgagtactagaggacaggcccctcagcgacaagggctctggagacagctcccaggtcactcaagtcagtccccagaggattgcactccggctccggccagatgattcgaagaatttctccatccaagtgcggcaggtggaggattaccctgtggacatctactacttgatggacctgtcttactccatgaaggatgatctgtggagcatccagaacctgggtaccaagctggccacccagatgcgaaagctcaccagtaacctgcggattggcttcggggcatttgtggacaagcctgtgtcaccatacatgtatatctccccaccagaggccctcgaaaacccctgctatgatatgaagaccacctgcttgcccatgtttggctacaaacacgtgctgacgctaactgaccaggtgacccgcttcaatgaggaagtgaagaagcagagtgtgtcacggaaccgagatgccccagagggtggctttgatgccatcatgcaggctacagtctgtgatgaaaagattggctggaggaatgatgcatcccacttgctggtgtttaccactgatgccaagactcatatagcattggacggaaggctggcaggcattgtccagcctaatgacgggcagtgtcatgttggtagtgacaatcattactctgcctccactaccatggattatccctctttggggctgatgactgagaagctatcccagaaaaacatcaatttgatctttgcagtgactgaaaatgtagtcaatctctatcagaactatagtgagctcatcccagggaccacagttggggttctgtccatggattccagcaatgtcctccagctcattgttgatgcttatgggaaaatccgttctaaagtagagctggaagtgcgtgacctccctgaagagttgtctctatccttcaatgccacctgcctcaacaatgaggtcatccctggcctcaagtcttgtatgggactcaagattggagacacggtgagcttcagcattgaggccaaggtgcgaggctgtccccaggagaaggagaagtcctttaccataaagcccgtgggcttcaaggacagcctgatcgtccaggtcacctttgattgtgactgtgcctgccaggcccaagctgaacctaatagccatcgctgcaacaatggcaatgggacctttgagtgtggggtatgccgttgtgggcctggctggctgggatcccagtgtgagtgctcagaggaggactatcgcccttcccagcaggacgaatgcagcccccgagagggtcagcccgtctgcagccagcggggcgagtgcctctgtggtcaatgtgtctgccacagcagtgactttggcaagatcacgggcaagtactgcgagtgtgacgacttctcctgtgtccgctacaagggggagatgtgctcaggccatggccagtgcagctgtggggactgcctgtgtgactccgactggaccggctactactgcaactgtaccacgcgtactgacacctgcatgtccagcaatgggctgctgtgcagcggccgcggcaagtgtgaatgtggcagctgtgtctgtatccagccgggctcctatggggacacctgtgagaagtgccccacctgcccagatgcctgcacctttaagaaagaatgtgtggagtgtaagaagtttgaccggggagccctacatgacgaaaatacctgcaaccgttactgccgtgacgagattgagtcagtgaaagagcttaaggacactggcaaggatgcagtgaattgtacctataagaatgaggatgactgtgtcgtcagattccagtactatgaagattctagtggaaagtccatcctgtatgtggtagaagagccagagtgtcccaagggccctgacatcctggtggtcctgctctcagtgatgggggccattctgctcattggccttgccgccctgctcatctggaaactcctcatcaccatccacgaccgaaaagaattcgctaaatttgaggaagaacgcgccagagcaaaatgggacacagccaacaacccactgtataaagaggccacgtctaccttcaccaatatcacgtaccggggcacttaatgataagcagtcatcctcagatcattatcagcctgtgccacgattgcaggagtccctgccatcatgtttacagaggacagtatttgtggggagggatttggggctcagagtggggtaggttgggagaatgtcagtatgtggaannnnnnnnnnnnnnnnnnnnnnnnnnnnnnnnnnnnnnnnnnnnnnnnnnnntgtgtgtgggagtgtgtaatttaaaattgtgatgtgtcctgataagctgagctccttagcctttgtcccagaatgcctcctgcagggattcttcctgcttagcttgagggtgactatggagctgagcaggtgttcttcattacctcagtgagaagccagctttcctcatcaggccattgtccctgaagagaagggcagggctgaggcctctcattccagaggaagggacaccaagccttggctctaccctgagttcataaatttatggttctcaggcctgactctcagcagctatggtaggaactgctgggcttggcagcccgggtcatctgtacctctgcctcctttcccctccctcaggccgaaggaggagtcagggagagctgaactattagagctgcctgtgccttttgccatcccctcaacccagctatggttctctcgcaagggaagtccttgcaagctaattctttgacctgttgggagtgaggatgtctgggccactcaggggtcattcatggcctgggggatgtaccagcatctcccagttcataatcacaacccttcagatttgccttattggcagctctactctggaggtttgtttagaagaagtgtgtcacccttaggccagcaccatctctttacctcctaattccacaccctcactgctgtagacatttgctatgagctggggatgtctctcatgaccaaatgcttttcctcaaagggagagagtgctattgtagagccagaggtctggccctatgcttccggcctcctgtccctcatccatagcacctccacatacctggccctgagccttggtgtgctgtatccatccatggggctgattgtatttaccttctacctcttggctgccttgtgaaggaattattcccatgagttggctgggaataagtgccaggatggaatgatgggtcagttgtatcagcacgtgtggcctgttcttctatgggttggacaacctcattttaactcagtctttaatctgagaggccacagtgcaattttattttatttttctcatgatgaggttttcttaacttaaaagaacatgtatataaacatgcttgcattatatttgtaaatttatgtgatggcaaagaaggagagcataggaaaccacacagacttgggcagggtacagacactcccacttggcatcattcacagcaagtcactggccagtggctggatctgtgaggggctctctcatgatagaaggctatggggatagatgtgtggacacattggacctttcctgaggaagagggactgttcttttgtcccagaaaagcagtggctccattggtgttgacatacatccaacattaaaagccacccccaaatgcccaagaaaaaaagaaagacttatcaacatttgttccatgagcagaaaactggagctctggcctcagtgttacagctaaataatctttaattaaggcaagtcactttcttcttcttaaagctgttttctagtttgagaaatgatgggattttagcagccagtcttgaaggtctctttcagtatcaacattctaagatgctgggacttactgtgtcatcaaatgtgcggttaagattctctgggatattgatactgtttgtgtttttagttgggagatctgagagacctggctttggcaagagcagatgtcattccatatcacctttctcaatgaaagtctcattctatcctctctccaaacccgttttccaacatttgttaatagttacgtctctcctgatgtagcacttaagcttcatttagttattatttctttcttcactttgcacacatttgcatccacatattagggaagaggaatccataagtagctgaaatatctattctgtattattgtgttaacattgagaataagccttggaattagatatggggcaatgactgagccctgtctcacccatggattactccttactgtagggaatggcagtatggtagagggataaatagggggcggggagggatagtcatggatccaagaagtccttagaaatagtggcagggaacaggtgtggaagctcatgcctgtaattataaccttcagctactaagacaggtgtggtggctcacgcctgtgattataatcttcagttactaagacagagtccatgagagtgttaatgggacattttctttagataagatgttttatatgaagaaactgtatcaaagggggaagaaaatgtatttaacaggtgaatcaaatcaggaatcttgtctgagctactggaatgaagttcacaggtcttgaagaccaatattatttgtcaatatgtggggataacctgtagctgcattcatgaggtagcaaatagcagttttggcctgtggggtgaacagctaaacagtgttctggcatcagataacacggcacaaagggattgtgtctagctcttttggagaaaatttatgtccagtctcaggatctgtggacaataacggaaaactttgaatattcctgacaagttgccatattaggagtcagttctttacttctctgagattcccaggtcatccatgattttttttttaatttgagacaaag

SEQ ID NO: 59 - DNA, 1273 bp, Homo sapiens
  misc_feature: Incyte ID No: 522433cB1
gccgcaacctgcacagccatgcccgggcaagaactcaggacgctgaatggctctcagatgctcctggtgttgctggtgctctcgtggctgccgcatgggggcgccctgtctctggccgaggcgagccgcgcaagtttcccgggaccctcagagttgcacaccgaagactccagattccgagagttgcggaaacgctacgaggacctgctaaccaggctgcgggccaaccagagctgggaagattcgaacaccgacctcgtcccggcccctgcagtccggatactcacgccagaagtgcggctgggatccggcggccacctgcacctgcgtatctctcgggccgcccttcccgaggggctccccgaggcctcccgccttcaccgggctctgttccggctgtccccgacggcgtcaaggtcgtgggacgtgacacgacctctgcggcgtcagctcagccttgcaagaccccaggcgcccgcgctgcacctgcgactgtcgccgccgccgtcgcagtcggaccaactgctggcagaatcttcgtccgcacggccccagctggagttgcacttgcggccgcaagccgccagggggcgccgcagagcgcgtgcgcgcaacggggaccactgtccgctcgggcccgggcgttgctgccgtctgcacacggtccgcgcgtcgctggaagacctgggctgggccgattgggtgctgtcgccacgggaggtgcaagtgaccatgtgcatcggcgcgtgcccgagccagttccgggcggcaaacatgcacgcgcagatcaagacgagcctgcaccgcctgaagcccgacacggtgccagcgccctgctgcgtgcccgccagctacaatcccatggtgctcattcaaaagaccgacaccggggtgtcgctccagacctatgatgacttgttagccaaagactgccactgcatatgagcagtcctggtccttccactgtgcacctgcgcgggggaggcgacctcagttgtcctgccctgtggaatgggctcaaggttcctgagacacccgattcctgcccaaacagctgtatttatataagtctgttatttattattaatttattggggtgaccttcttggggactcgggggctggtctgatggaactgtgtatttatttaaaactctggtgataaaaataaagctgtctgaactgttaaaaaaaaaaaaaaaaaaaaaaaaaaaaatggttgcggccgcaagcttattccctttagtgagggttaattttagcttgcactgacc

SEQ ID NO: 60 - DNA, 64 bp, Homo sapiens
  misc_feature: Incyte ID No: 081187.1
ccgcggcaggcaagagaagctgaggcctgagaacggcccgggccttggcgatgcagcaccgagg

SEQ ID NO: 61 - DNA, 1022 bp, Homo sapiens
  misc_feature: Incyte ID No: 2462908cB1
cagagcaggcttctgaggtctccaaaatgcctgtcccagcctcctggccccatcctcctgatcctttcctgcttctgactctactgctgggacttacagaagtggcaggtgaggaggagctacagatgattcagcctgagaagctcctgttggtcacagttggaaagacagccactctgcactgcactgtgacctccctgcttcccgtgggacccgtcctgtggttcagaggagttggaccaggccgagaattaatctacaatcaaaaagaaggccacttccccagggtaacaacagtttcagacctcacaaagagaaacaacatggacttttccatccgcatcagtagcatcaccccagcagatgtcggcacatactactgtgtgaagtttcgaaaagggagccctgagaacgtggagtttaagtctggaccaggcactgagatggctttgggtggcccggcatcatcccttactgcgctgctcctcatagctgtcctcctgggccccatctacgtcccctggaagcagaagacctgactctccttccttcctcccctgccacgtgggaccctcatctctgctgcctccttcctttcctgagaggctcagcttgagagaatgagccagtgagaagcttctctagacttggctccaaacatctcccctcccaagacatctgcctgcccacaggctcctgttgctccttcacacagacctggatgccccagagcaaggtcttcattcatggtcctgagcaggtgccatgggattgggctctgggcactgacttaacggcacctccctagaaggcgagaaacatgccaaatctaaacacaccaggactcccatccatcgccttgagactgaccgtaaaccacagacgctctccaggttctcaagagttatcctgccttccagattcctgcctatcccaactccccagccttgttgaggttctctattgcctcttgaatacaaatgcactcccaaagtggttttaagaaaataaaaagattatcc

SEQ ID NO: 62 - DNA, 1717 bp, Homo sapiens
  misc_feature: Incyte ID No: 350416.3
gagaagtttgacatctccccagcacagatatttggacggagcaggctcctgaggtcttcaggatacccatcccagcctcctggccccaccctcctggtcctttcctgctgctgattctgctgctgggatgcacagaagtggcaggtgaggaggagctacagatgattcagcctgagaagctcctgttggtcacagttggaaagacagccactctgcactgcactgtgacctccctgcttcccgtgggacccgtcctgtggttcagaggagttggaccaggccgagaattaatctacaatcaaaaagaaggccacttccccagggtaacaacagtttcagacctcacaaagagaaacaacatggacttttccatccgcatcagtagcatcaccccagcagatgtcggcacatactactgtgtgaagtttcgaaaagggagccctgagaacgtggagtttaagtctggaccaggcactgagatggctttgggtgccaaaccctctgcccccgtggtattgggccctgcggcgaggaccacacctgagcatacagtgagtttcacctgtgagtcccatggcttctctcccagagacatcaccctgaaatggttcaaaaatgggaatgagctctcagacttccagaccaacgtggaccccacaggacagagtgtggcctacagcatccgcagcacagccagggtggtactggacccctgggacgttcgctctcaggtcatctgcgaggtggcccatgtcaccttgcagggggaccctcttcgtgggactgccaacttgtctgaggccatccgagttccacccaccttggaggttactcaacagcccatgagggcggggaaccaggtaaacgtcacctgccaggtgaggaagttctacccccagagcctacagctgacctggttggagaatggaaacgtgtgccagagagaaacagcctcgacccttacagagaacaaggatggtacctacaactggacaagctggttcctggtgaacatatctgaccaaagggatgatgtggtcctcacctgccaggtgaagcatgatgggcagctggcggtcagcaaacgccttgccctggaggtcacagtccaccagaaggaccagagctcagatgctacccctggcccggcatcatctcttactgcgctgctcctcatagctgtcctcctgggccccatctacgtcccctggaagcagaagacctgactctccttccttcctcccctgccacgtgggaccctcatctctgctgcctccttcctttcctgagaggctcagcttgagagaataagccagtgagaagcttctctagacttggctccaaacatctcccctcccaagacatctgcctgcccacaggctcctgttgctccttcacacagacctggatgccccagagcaaggtcttcattcatggtcctgagcaggggccatgggattgggctctgggcactgacttaacggcacctccctagaaggcgagaaacatgccaaatctaaacacaccaggactcccatccatcgccttgagactgaccgtaaaccacagacgctctccaggttctcaagagttatcctgccttccagattcctgcctatcccaactccccagccttgttgaggttctctattgcctcttgaatacaaatgcactcccaaagtggttttaagaaaataaaaagattatccttcccccc

SEQ ID NO: 63 - DNA, 462 bp, Homo sapiens
  misc_feature: Incyte ID No: 1061366.15
atgcttttggtttttttcttgcaatttaacaaagtggtgtcccatatatttaagtatcaaatgtataactgaattttctttcttttcagggatctcaagggcatttccctttgcccacctcaccttttcatatttggtaaactgtatgcatttgcctccagcccaagattataaatatgaactgattatgatctgcatgttctctctttgggttcaagcatttccttacagaagagccaccgtggaagtcatgggtaaatatgtgttgaattggtaactccctcttggagaatttcttgtgaattacacagcaataggggaactcatttaactggagacataatctcaatttgtaaagtgtggcccattttctaacatttttattttgcataccctcccctctcttctcgattgatgaaactaacaaagaggttaataaaagcccatctcgtcatgtaaaaa

SEQ ID NO: 64 - DNA, 870 bp, Homo sapiens
  misc_feature: Incyte ID No: 026200.1
ccacaaactaatgaggcagcaggtgtctgaagagaaacattgcagaatgtctgccaggggttttatggttaattttcctccattatgagggttgactcagccttgggtattagatgtctttgagaatccagggttcaaataccacagctggtagaatgtttctcaacttggagccaatctccatctactgaaggtacgctggtttagacagacaacagggacatcagcattttaaaaagcggtggaaaaagtttgcttgtcttgattggagccatgacattttattttgaaatttcaaataacatgaagggaggtttggagcggtttttggtttatccaaagggcagtggattgaaggctgagaaacaccaggctgaatgggagaggggttggggtccccctgtgagatagtgaaacaatggtagtgccatccaatgataggcacttttctgtcattcagaagcagaaagggggccagaggcaattggccttactgggcagtaagctgtagagctgctgccttttcgtgaaagggttgacaccaaccttctcccccaggaagagtgaccagggacctgaggggcatggtcgagcagatgacagcctttgtaaaacatctccctggtctcatcagcgatattcgtcctgccttccttctgagtaatttccatcttaggactggagtcaggtggagcaagattccatgttggtttctgttgggcctagagtgtcacactgagacctaatgtcatactttatgaattctagtactgctctcgaaggtaagagccctcctctttggctgaaggtttttgcctgcaacgttgcattgtaatccagtgacacctgacgtatctgtaaatttcttca

SEQ ID NO: 65 - DNA, 291 bp, Homo sapiens
  misc_feature: Incyte ID No: 214744.1
catacttgatggtctcagatatgtgtggattttggaattccccttggaacaggttgtaacatcttattggctccataattccataatttttttaatctgatcagtttttaataagatcgcaatttatattagactacttaatcggttttgttaatgagaaaatgaaattgtgttgtttgcattttatccaagatgggtgtcatattgggtaaatctcatcaatacttgaacaaatgcaaaattagagcttctttatcatgaaacacgatgtaattcttgaagaagatgcca

SEQ ID NO: 66 - DNA, 525 bp, Homo sapiens
  misc_feature: Incyte ID No: 214811.1
gtggcactgaaatggttctttagtgtgttgtgagaaaatttcaatgaagtcatttatagaaaactgtttttctcaagggaatttccctttccccttttcagaagtcagaggaaaaaaaaactggaattagagtatagagttagagataaagcgaaacgatggcagaatatgctgagacatttgctcaggggttaaaagacagggagtttatagaactcccttttctgcttgtcataaggttatctgttccttcttttggacatctctctagaggtgttcccaagctttgtatcacagattcttttatcgtgggggtcctaaactttaaccatttaaaaataaaaaccaagggttaccaaacaccttaatagagacttctctatgaagttacaagaagtaaacaaccatatggaagaatttgatgtgttctttgaagtcactgcttgtaagagaagacaacgtgtaatttttgagttactgtatgactcacgttggaaatgtttaaagccttctgtaggcatggtg

SEQ ID NO: 67 - DNA, 583 bp, Homo sapiens
  misc_feature: Incyte ID No: 107572.1
atcggatacaggtttagcctaggactaggcagggctgctggtaattgtggaagtagtctcattgcctaacctgaaacttgcatcctggttactggtcttgctggagagtcttggctcaggttacgtcccaggtctgttgaggagctcttgatagggaattagttgaagcagctcatactctatcctcctttactggtataaatccataaaattgtttagttcccaggctctggggtccctggcctagcagagagcactgctccctttttctcattccttagtcccaacaacccgcacctgacacttactacacgtggcctgcttccctgtcctgtgtgttttggggggtgctgaagaggaaggctcctgtgtcttcagcacaaacacaataaacacttcacagcagtactggctttatgttttccatttctgatatcagaagtaggagcatgacattgatagtgtcattttgggggaacttttcgtacttcatgcagcagagcagtgaagagtgagctgagtgccttggggttctgcagtacactctcaagtagtattttaggaaaatgcaatttgctgaaaa

SEQ ID NO: 68 - DNA, 473 bp, Homo sapiens
  misc_feature: Incyte ID No: 215003.1
ctctttgagttctttaataacatgtctcagaagtaaggtctgagtttcctacttttaaatggaagtgatactaacacctatcttacggagttgtcgagaggatttaaaaagttaaaactgcacataaaacatttacagctgtgcccagcccatgacatctgctcagtgaatgttgttggtagcagtagtagatccgggattctgaagtgcaaagtgccgtagcaggagtgtaaaaattgtgtaattcctgccacaccctattggcaccagaataaggtcacattctttctgccacgtatggagaagtgtgaaaagcaacattgttagttctagctcatatgggaaaagcaactacagcccgaagtgcaggtaatctcccgattacccaatctcgtttctttcgcagtttaaatatgaatcttacataggtggagggttcttctactgaattcagttaccttgtcttttgtgta

SEQ ID NO: 69 - DNA, 544 bp, Homo sapiens
  misc_feature: Incyte ID No: 106250.1
ccaagatctatattaaactaaatatgaattcttactgatgtctccaagtctaattcattaacacaaagatcattgtagcctccttcccttgcttatctgtgacctcccacttcaacaaaatgtcatgtaattggaatcatacagtatgtagcctttcagactagctttttccaccattggccatccatttacttaatcctagtatacccctataggaaaaaactttattaattacagtacagtgcttttgtacagttcttttttactttattcttacattctccactcatttccaaagttacttaggtcagcaccttatttctccattcctttcagtgaggttcttttcatacatttgtaatatagttattttgttgtattctgtattccatcttgggcttcctgaacctcctaaataacttttttttcaatttgcataccttaagattccctcttttgtgttgtatagttttatagattttgacaaatgaaaatagtgtcgtgcgcccccattacagtagtatacatagtagtatcactccct

SEQ ID NO: 70 - DNA, 660 bp, Homo sapiens
  misc_feature: Incyte ID No: 403668.1
gttttcagggtagtcagttatattttaatgtatctttttgttgctgttgttataaggtaaaactaatcatgtcatcttaaaaattgtttttaaaagtttatatactatggctgtaaggatgctttatgtttacatgatgctttacagtattagataagtaataaaaacagtgctacatgtttccatttgctacacacaaccccccgagaggtgagcagtgcttgtcatctgcttttcacagatgaggaaatggggaagtggaggaaggagtggctgcccctgggcacttcactaggaagagatgatggcagcgatgccattcacacatcttatctcatagaatcctcacaactgctagggaagtatcatcacctctactttattgaatgagaaaaatgagctctgggaggttaaataactaacccaggctgatgggtggtgaggctgaactggctcttaaccagtagctttcctgtagtgtcccacaaggaaggagcacactgcatattaaaattattagataacaacattagttttatgatttactaaactcttctcttcttgactctttgacgaaggtaaagtagatagctttcctgaattttttttttaataggataagacaaatgtgtgagatcttaatacttgtctcttgggaga

SEQ ID NO: 71 - DNA, 201 bp, Homo sapiens
  misc_feature: Incyte ID No: 011664.1
acacccatctggtctgggcatcttcctttcctttttcactatgtatcctgttactgggcttaaacagctttcagagaagagatgtcatttctattaaatgctctttcagtagcgaactgagttcacacttgactaaggatattttccggactgtctgtcatcagcatccttagtgggtttccccatatttaaattggtaga

SEQ ID NO: 72 - DNA, 1191 bp, Homo sapiens
  misc_feature: Incyte ID No: 059849.1
caggactgggtctggcacatattcaccaagtgacttccccattggttctttgaaaataaggtgcccagaattggtcagaatcacctatattttgcccctagtttgcttaggtgaaaagcgaaaggcaagggagggcaaagcctggggacatcagcattaaagggtgtgtggcacccaggacatagccccaccccagcaacctggagagggagaagcttccgtggtgtggaaggggatgtccgctgtggaaaacctgggctctgtggacatcaaaatgagcaaagaaacaataaaaagttgtagtaaactcactcactctatctacacaaaaagacgtctttggggcccgcatgctttccctggacagaaaccggacctcctcatcttgcaagcctgttgccctctcagaagccgtggatcgtctttcctaagtacagagttgaccttgaagttgtgaaagtggaagctcaagtggagcttacttcaaagctttggaaattatctcactaaccagcattactttgcagaagtgggactaaggctcggaggctgggttgcttggaggccaagccagttccagaacccaggattttgactctgccccatttagctcaatgcagtgccgccttccttctttgactgtggacacttaacttgcctttaaaacttggccacatttattttcatagtttatgacattgacatacctgtgcataactctgtctcagcattttaaggccctggtggtgcacaggaagccgtgactaaaatgataggtacactgttcctaatacgggatataaaagactcaacaccacacctgacaaaagaagctgttgtcttaaagatgcatcttcctttaaagtaaatgaataacaaaggtaggccataaggagcttcttatctactttaagctcttggctggcttttccaggaagtttgaggagataaatcatgactcattttctgcagggtcagtggggaaactggagaggtggctgtccctgttcctgccggtgcctgaagctttcagtgttgttccatcacactctggctccatacctttcctcctgtcctccctccctgttggctggagtctaatgtgacacttcttccaaaacacagaaccgcctacattgtgtaagaagactctcaaaaaccattgattgaaatgctgctgatgccaaaaaa

SEQ ID NO: 73 - DNA, 1753 bp, Homo sapiens
  misc_feature: Incyte ID No: 1197030.23
ttgagagcaggtactgtttattaaccaaccagcttagaaaaataatcatggtagacaccttagttcattcttctaataagcctgtgatctggtcctccctgtgccagcatctccaccttctacaaaatgggtggtctttttcttcattccacctcgtggagaagacaatttgaagggccacaggaagttatttgcctctttgaagcgttttccaacagtatagatctcatgaatcaaatcctccatgcagatgatgccgtatttacctaccaagagatcgagcaatcaaagcgttatctgtcaaagcaattcgcttcttattgattttgccataaccacgcttgtagattagttcatttactgacttcagattggggtacccccatgcaatatatggctctacaatcctcagcatgttaatcgaagccttgttgagcttcacaaaggttccattgaagatttgacgaaggcgaagaagctgcaacacctttcgaaccttggggctcactccattgatacctctgattctgatgacaaacgccaatttgggttctgcaggtacatagaagttgccagcttttcttgccatcctcgccattcgaatttcagttctgtacatctgcctatattccttgtgatagtgctttgctttttcatagataagcttcctccttgcctttcgaagcatcttttgggcaaacttctttctcaggcgcttgatcttcagctctgcgaaattccttcgctttttccggctggaaccatggagggtgtagaagagaagaagaaggaggttcctgctgtgccagaaacccttaagaaaaagcgaaggaatttcgcagagctgaagatcaagcgcctgagaaagaagtttgcccaaaagatgcttcgaaaggcaaggaggaagcttatctatgaaaaagcaaagcactatcacaaggaatataggcagatgtacagaactgaaattcgaatggcgaggatggcaagaaaagctggcaacttctatgtacctgcagaacccaaattggcgtttgtcatcagaatcagaggtatcaatggagtgagcccaaaggttcgaaaggtgttgcagcttcttcgccttcgtcaaatcttcaatggaacctttgtgaagctcaacaaggcttcgattaacatgctgaggattgtagagccatatattgcatgggggtaccccaatctgaagtcagtaaatgaactaatctacaagcgtggttatggcaaaatcaataagaagcgaattgctttgacagataacgctttgattgctcgatctcttggtaaatacggcatcatctgcatggaggatttgattcatgagatctatactgttggaaaacgcttcaaagaggcaaataacttcctgtggcccttcaaattgtcttctccacgaggtggaatgaagaaaaagaccacccattttgtagaaggtggagatgctggcaacagggaggaccagatcaacaggcttattagaagaatgaactaaggtgtctaccatgattatttttcaatttgagagcaggtactgtttattaactgaccagcttagaaaaataatcatggaagacaccttagttcattcttctaataagcctgttgatctggtcctccctgttgccagcatctccaccttctacaaatgggtggcctttttcttcattccacctcgtggataagataatttgaagggccacaggaagttatttgtttttttgcagacttttccaac

SEQ ID NO: 74 - DNA, 256 bp, Homo sapiens
  misc_feature: Incyte ID No: 042195.1
ggccatctcagttgccaaatggaagaaaattcgtgttctgatgtcagttaatttaatcccttgtagcctgggaacatctgtattttgaatgatttagaaaggaatttcaaatatctgtatttagagaactgtctaagcgatgacatcactttcagtggaagtaataatttgttccagcatttcagcaaatagaatttttttggcaaaatatttttggaactcctttagtatttaaaaaacataaaaaggcggggca

SEQ ID NO: 75 - DNA, 1877 bp, Homo sapiens
  misc_feature: Incyte ID No: 983907.1
gctgaagtctaagcagaagcttgggaagtgagtgctgatcaggattcacctgtctgcctggcagtggtcagcccgcttctcacgcaagaaaccattgacaacgaaagtaccacagtggccatggcgtaggcgtcgacagcgcgaacttacgtttcacgagcaattacgaacaaatcttgggagcgggcaagggccgacagagagaaacaacttcactgtatcaaccttctcaagagtctattgtacacgtaaccccatcccacatccatgagcttaaccagtttctactgcggaacacgctcacgcatcattgtgactgcgtggcattcacgttccctaaacttggcaggccactgcacttgagcgccctttgcacgttttcctgctttagcgggcaaagctgcaagaaacgcggaaacgagacacgtcatgccgtttgctaatcattccagatggcctgcatcaatattttgggggcagaattagcttctgggtggccagagcctttggtctaaccctgagtgtctgggcgttgtgcagcagagcgagaaagccctggctgtttgacggggtgtgtccaccagtgcttcctggcacaggtcggccgggctgcttcacttcttgtttccagagattcacggcaccagtccccctctggtacccagcctgacagggccatgttggtgggaccaaagctgtactgttgtttatgacgtgtttcatgtcagtatttcaggcccacccactgggctccccctcccagattgccaaagttgtggagtctgtttttcttagttgaatgtcttagttctctgggataggtgaacagatctcaagagcaaggaacatcatcgcaggtctgaggaggctagattcccagtcctgttggagttttttaaatctgatttaatgatctgaccctcccactcctatctctgccccatccgagtctggctgctttcccagggggcagagcagctgtgccaaaaggaactctaacgtgaaaagcgcccttcacttgtagcttgtgcaggccagtcttgcttacccctttagattaacaaaactgccttcacttgtctcattgggattaaaggatcagaatatcaagagagattgaagggggaagatgccagccaacagcgctgatcctcttagaacctgccctctgattcctgcagctgaagagaaaccaaatgaaggcgattagtctctgcctggggtcccccttcccaagtgggtaccactagctgggaacctcgccccctccaccaggccctctccccagcctgtcctttaggattgctgaatcagtggttagatgttcttacggctcttctctgaaacggagttactgctccttcttaggcacccctggctcagccaagccctgacccacctgacgggttttcatgtgtgcctagctgggtggtggacttggagaggcacagggacagcttggggctccaggggggcattgaggcagcactgatgcagcttaggattagcaaggtcaaggtgactggctttcacccatatgttcctctgtatggatttcactgagcctcgattgctgccccttttcatggcattttgttctgggattttgctttgaaagttagggctctttcagccttgtggtgagcagtgaattgtcctcgtcctctgcttcactttccagattttgcccagaaatttccctgcagtgcttaggaagctgcctggtagagcaggtttctaagtttgaggcgaagcagctctggaagctgcctctgtccttgctgttggaggcagtgatttaagtagcagttgcctagagatacatcctttctgttttaatctcaaagagagaaaaacccagtccctgtaatcccagc

SEQ ID NO: 76 - DNA, 2622 bp, Homo sapiens
  misc_feature: Incyte ID No: 210826.1
  unsure 991-992: a, t, c, g, or other
ctgaaacatttacgtattttcctgatttaggcaaatataatattgaaagttacctgtatgtgggcatttttttctacactcataaatgcaaatcaaattttgccattagctgtggccaacattccttccaggacaaaagcttacaaagtgctgggattgcaggtgtgagccaccatgcccggactatggccattattttacgtgtttttattattgctctggttctccctttagggaggcattcagtgagtataccccatctgtcacaggcccccaccactccctgtggtcttacactctgctgaattcatacatttaggtaacttccctggccctcctgagaatcacttatttttgtaacctcctgtatttgagatgtaggaaactggggcctgaggagaagttgacttgccttgggtcccacagtggtacaggcagatctagaactcagattttccagggctctttcagtaggctgtggttgagcagtagtcaagaccacctcttcaagaagggaaaaacatttgtcttctctttctcctctttcttccttctgcctctcactgtaagaagaaacgtgttaataagttgctaataccttactctaggtgtatttcatgttacaccagccagtgcttgtattctcaatgaccataaggagaggaatgcggaagaattgatttctgtactaaaagttcagactctgtggcacttgtgatatttctggacaactgactcttctctattgcctttcgaatcatacagtggcaaagctgctcacccatgtgtgtataaagctgacccttcatcagaaaggcagcccccagtgtctccccacacagggcagaagagcagagggagcaggtggcaatgtggcagcaccttgaactgtgcatcactgggcctgctccccctcatcccaaagcaataacccagaaattacatcctgagacttacttcctcagaaagaaaaggaaggggagggataacnnttaaaacaggagaaacttctaactatggtacttaagaaactggtaaccttcactcagcggaacatttatgcctgagatatgaatttctgaaaataaggggcttttttggaagggaaacactgacacatccttaattatagagtaataaataccaatggtatattatctttcgatatttccttacacagatatcaaagcatgcagctgtttttgaaaactgataatcaagtacaatataagtatattacatcttgcacttacaacacacccttcaactaagcagcatcatggagcacttaacggtgagaaacagagctgctcatagtagaaacctaactgaacaaattagctttgaattgtaacttaagaatcgtagtcaaaccaaagcgtctgtccttgccaggaaaggcattccaaaggcagagagcatgccaagtaaaaaggctttgcttcaggattatggagacagttctgaaaagccagcataacttaatgatcaatcagaaaaatatagagcagtaactacacaactgaaggatgcataaaaattgtacaaaacgttaatagtggaatggggaggtaggatgggattttacgggcaagtattaagctcttggaaagcttcatttgttgccctcaatccacacagcagaaagaaagagaaagagacaaacatggtcaaagaaaagtatgtggacaaatgtggggggtagaaaaggaaatgaaggttaagcaaggccaatataattcagaataaaagggagggagggaagtataaggagccagctgtaattactgaatgttacattaagaagagctgaaattgagagggggaggtcttgagtattttactaagtggattaatgtcctcttcctcgggtgtctgaagttgcagattttaatttatttggtgcagggatttattacagaattcttaatgggtggggagataaacagggacaattataagctcttaagaagaagaaaagaggaccatataatactttctataaatttaactgtaataaacagggtttcaagctatggacaaaggtagtcaaaaaaagcatttattccatgatataggactaaaagggaaataagaggtgtgtccaaaaaacttaaagaccaaaacaaagaaagaaaaacccacatagatgtgtgatgccaggattttgaatgacttgggagctagttattgccgctctcctttctccacccatttaaaaaaataaatcataactctggcatttaaaaacctactcatgaacatcatttattaatataaacttaatcctgtgctattctttggtgggtggtaagaacatgaattaacaacaactggactaaaacgatggcaacaggatgatccactcaaacacaggaaagctgtaagaaaaagaaaaactcctaatcttctctttctcctctttcttccttctgcctctcactgtaagaagaaacgtgttaataagttgctaataccttactctaggtgtatttcatgttacaccagccagtgcttgtattctcaatgaccataaggagaggaatgcggaagaattgatttctgtactaaaagttcagactctgtggcacttgtgatatttctggacaactgactcttctc

SEQ ID NO: 77 - DNA, 578 bp, Homo sapiens
  misc_feature: Incyte ID No: 343356.1
cttagatcctagttcttgttatgatgagtgactttggctgtatcctggtcatcttcactgttatgaagctctgggagttatttaaatctctcagcatgcttcctctgacggtgctggtatgggatggggcactgcctcgttactgcctggtgaggatggagatccaggtttcctcctgtcgctgtcctcgggacctctgctgaggcctttctgctggaagtaggaggagcaccctaatggcaccgtgggatagggagcaggccatgttaggctggatggtgaaagttttcagcctgtgacgttgtctggtgtgggtgggtcccctttttttgtgtgtggtattttgctagagtaaggtagttatttcctaaaacttatctgtcctgttagttttccttcttaagtacctaacaaatataaagacaatgaactttaagcaataaaagacaatgatcctttggagaggggaaacaaaattatctgtacttactatctgcggagagtccgtggttctaggaagggttacccatcaggacctggcggtctcctggagttgaggtgcagttgggcagtcgaaa

SEQ ID NO: 78 - DNA, 546 bp, Homo sapiens
  misc_feature: Incyte ID No: 1439948.1
  unsure 520: a, t, c, g, or other
tgtgttaataagccaaaccattataagttgaggactgtctacacaatggattgaagggagggcaagaaaagttagtaggagactattaggagagatgcttctcaaattttaatgttcctataaagcatctgggggtcttgttaaagtgcaaattctgatttagtacatcagatacgaagcctgagaatctgcctttctaacaagccctcagtgatgctggcgattcttgtcctgagatttcactctgagcaatgagtacctggatgaaactacactagtggtggtggagatggaaagggacagattcaagacagattagagaaacaaaagcaacagagcctattgaagaagaagatgagagccatggtgaaaagaggagatatcaaggacggtgtctgtatttcgggcttatacaactggctgtggatagtgctactcactccagaatgcttagggagtttaacatattctgttttgtgcatgaacaaggaggctagtagtagggtagaattcttgaganaagtggaaatggtttgaagttgctac

SEQ ID NO: 79 - DNA, 612 bp, Homo sapiens
  misc_feature: Incyte ID No: 984996.3
gcactgctgctgtcccatcagctgctctgaagctccatggtgcccagaatcttcgctcctgcttatgtgtcagtctgtctcctcctcttgtgtccaagggaagtcatcgctcccgctggctcagaaccatggctgtgccagccggcacccaggtgtggagacaagatctacaaccccttggagcagtgctgttacaatgacgccatcgtgtccctgagcgagacccgccaatgtggtcccccctgcaccttctggccctgctttgagctctgctgtcttgattcctttggcctcacaaacgattttgttgtgaagctgaaggttcagggtgtgaattcccagtgccactcatctcccatctccagtaaatgtgaaagcagaagacgttttccctgagaagacatagaaagaaaatcaactttcactaaggcatctcagaaacataggctaaggtaatatgtgtaccagtagagaagcctgaggaatttacaaaatgatgcagctccaagccattgtatggcccatgtgggagactgatgggacatggagaatgacagtagattatcaggaaataaataaagtggtttttccaatgtacacacctgtaaaaaa

SEQ ID NO: 80 - DNA, 520 bp, Homo sapiens
  misc_feature: Incyte ID No: 102564.1
ataatactaaaataatagagatcttcaggtagtagcattttgatggatgacttctatttggaaaacctcagcttctcaaaataacgtatagatttatgattctatatggaaattgatgtggtaatattaaatagcatttactgtgttataccaagacatatatgtttatagagaggaaacataaagaaagtacaaggggcatgaatgtacatggcatatatccttgaatgctgagtagtgtggtgtcaccagacaatgggttatgtggggaagactgctgagaggtgccaaagggatttgtatatgaagcaaagcggcttgggggttgggcttcattttacaggcctccaacatataaggcaaaacttattgaatggtaaatgagtatagcaaggatgaattttattgtatgtaaattatacctcagtgaacctgacctttaaaagaaagaaaacaatgaggttgaagaatggattttggaagctaacaattcagaagtgtttggtgactttggcaaaaa

SEQ ID NO: 81 - DNA, 747 bp, Homo sapiens
  misc_feature: Incyte ID No: 146768.1
atgtgttgttttatgcttttggaaatatgaactctgaactcttgattttctgtggaataattaaataagctggtctaagtagcatggtctttaagcctatagtaaatgttttattcatacagctcacttttgtatattaatatttttaatgagaaataatactgatgtttttacttttggaaattttgatttcttttgccaaaaaattgtttttttttctttttcaaaaaaggcctacctctttgtggttagaacaactttgaagagcatctttcttagttcatgtgctaaaagttaatgtaatagaagcacaaagactgtaaccgctattactcgactaaaaaaatagtttctaaaagtatgagatgcataagaacaaaatctataattttagttatgcatctgaatgtctgtcaccatgatgacaacttttaaaagaaaataaagacagaactaatgccactttaaaggctcaaattatgaatgtggagatattttgacccagtaaatactctataattaagtaggtggtgtggatgagtattgtgtaatatttattttgctttatgaaaactgccttgtttttaaataaaactttaatgttagacttaagagcttataatggtaagacgataaaaagtattaacttaaaatgttttgaaaattataaaagtaattattgaccatttctaagaaagtctttcctttgacattgtttaatttgtttcctttttgttttttaggttt

SEQ ID NO: 82 - DNA, 405 bp, Homo sapiens
  misc_feature: Incyte ID No: 340291.1
gaaccgtactctgatgagcatctaagaaacacagaaactcagaaatgaaaccatgtggctctggcactgctgacatagaatcactgatttcaaatatcagacttctcaaaaagaaggtacaatgaggagtcaggagtctgcaacatggaagagagctctcaccagaatccgatcatgctggcaccctaatttcaaatttccagcctccagaactgctccaagaaatggaattttattaaaagatggaagaggaggatatttgagagaaggggaactacctaatactgaaaactaatacagtccaggatacatagaagatgatcaataacacttattcaatctaaattaccctatcagcaagtggagaattctctctcgggagtgctgttttctttcctgccagtc

SEQ ID NO: 83 - DNA, 1196 bp, Homo sapiens
  misc_feature: Incyte ID No: 134460.1
cggggacgcgcgcccggcctgtcgctgtggaaaccgctaggccagcgctcgccgggacctggaatccctgtacgccgaggtgggagccggtggaccggtcccccagccggcccccacctccgcttcccggtgtttgagggttcgggcctcccgccggggagttcacccctcgggctcgtcagtagggctgtggctgtcgcctcttcctgcagcgccaggctccgcccggtctcacagtcggcttaggggctttgcgtgcactgcggttgggtggaaaaacccactcctggttgtttagacgttggcctgcagacgatgtcatttctgtattcctctaaggcaggaagtcattatgcaacttacacatattcatcagatttcctctgacttacccggacatgtacgtgggaatgatgtgcactgccaagaaatgtgggattaggtttcagcctccagctattatcttaatctatgagagtgaaatcaaggggaaaattcgccagcgcattatgccagttcgaaacttttcaaagttttcagattgcaccagagctgctgaacaattaaagaataatccgcgacacaagagttacctagaacaagtatccctgaggcagctagagaagctattcagttttttacgaggttacttgtcggggcagagtctggcagaaacaatggaacaaattcaacgggaaacaaccattgatcctgaggaagacctgaacaaactagatgacaaggagcttgccaaaagaaagagcatcatggatgaactttttgagaaaaatcagaagaagaaggatgatccaaattttgtttatgacattgaggttgaatttccacaggacgatcaactgcagtcctgtggctgggacacagagtcagctgatgagttctgataccaaacactcaaaacatgcattgggctagcagaatatccatgtttattaccagactggttctggaagaagctgtaaagaatactaaatatgttgggttataggggattgaccatgttacttttcaaaaccaggacatttaaagcatctactatgtaggtgcatgaggagtatgggaaaaacagaataaaggaatctgcctttaaggagcttacaatcatgccgggtgcggttggctcacgccatgtatatccctagcactttgggaggcatgaggcggagtggatcacctaa

SEQ ID NO: 84 - DNA, 573 bp, Homo sapiens
  misc_feature: Incyte ID No: 053411.1
  unsure 27: a, t, c, g, or other
ccagagcgctgggattacaggcgtgancaccacgctgggcagatagacccctcttattggttgctttatgatagaacaccaagaagtttcaacaatctttatgtatggggttactttaaaattctgcatttggtttttacttggctgttaatttatatcatcttaaaataaataggtattgttacttagtgcacattttttaaatcaggtcatttattcagtaagcatttttgagtgcctagcgtgtgtcaagcctgctgtgcactgggtagatgagtagaggtatgggatctgaaacgaaggcagtaatagtcctactgtgagatcagcctcatgtaaagcagtggttatcacactcggggggctgaaacccatttaccttcttgaaaatttttgtggatgctaaagagcttttatttatgtggactatagctattgataccatatatgaattaaaactgatatttcaaatatttattacaaaaataaaattatattttaagtaacatttttggaagatattttctaaaaaaacaaaaagttagaaaactggcatcgttttacatcttgcaa

SEQ ID NO: 85 - DNA, 742 bp, Homo sapiens
  misc_feature: Incyte ID No: 1448208.1
atcatcacatctgtgaaatcgcttttaccacgaattcacagactgattctggggattaggacgtgggtatgtttgaaggtcccttggttgtgcctaccacagactccaaggcatttactagagccacattttgctgacttgagctagatgtagcaaaagaagtgttataaaaatgagtttttaaaaaagcctttttttttcctgtggtataattttagtgtttagaagtaatttttcttttaatgcagtatgacacagaaaacatttggaggatgttgaaaagtaattgtttaaattggcaaagacacatttcagtaagggagtaaacaagagggaaacgtgttggggggaaaggtgtggggaggaaactctagaccagaggccctaggacttgaatatacaacttagtcctgttgaaaattcagattcctgggccttaaagtatgttaaataggtcaggggtggggcccaggagttgtacttttaacgagcaccctcctgtgattcatttaacataaaaggtccttggctcacacttggagaaacactgctgtagaaactcaaatacctattttaaaacaaaggtacattttaatcatttagtttaaaatgaaatcattgcacaatactgatgttagaggttagaataaacatgtacttaagttcttgatattcttgtcatttcagttacatgtcagggaatgtgatttgtgttttgacgtattcaaatccttgtcatatt

SEQ ID NO: 86 - DNA, 756 bp, Homo sapiens
  misc_feature: Incyte ID No: 070655.1
ttcaaaagggttaatgagctcacatacaagagatggtggatcttgtggcccagaagtaccacttctttgtgtgtgagacaagcagggtgcctttcaatttgccagattaataagcaatctgtacataaagattgcagggtaaggagatgggcagagagaagtaatagctcgctataactttttaaatgactgttaaatcctctcaattttaatgtaatttgcttggggtatatttgtgtggttaaaataggtggcaatctaggaataaagattgcaagacacttaggacaaaatataatcttagtgccagtacatacaagataatagttggggaggtaaagaatgtcttataattgttgcagattgcataggtatttaaaagcaaaagagtgattaacattttaacttgatattttttggtgggggaggtacagttaaatagagggtggaaaggttgggaaatgtggaatttaggagtataattttaaaagccatttagtgcaattgaatgctagctttctaaaagatttgtgtcgttaaaaggaatttttttcttccctgcttcaatatggcgactttccttgtccttttgtcttccaagcggcgttgcaggttgtgtcttgacccattttttttcctgtcctcccacctcaaccctatttgttgagaggggtccaagtccttcctccccctttccctctatagggaggatgggggtggtcgatggtagccggttgaacctccgttgcaaattca

SEQ ID NO: 87 - DNA, 2219 bp, Homo sapiens
  misc_feature: Incyte ID No: 406389.1
gcggccgctgacgcggggcgccagctgccaacttcgcgcgcggagctccccggcggtgcagtcccgtcccggcggcgcgggcggcatgaagactagccgccgcggccgagcgctcctggccgtggccctgaacctgctggcgctgctgttcgccaccaccgctttcctcaccacgcactggtgccagggcacgcagcgggtccccaagccgggctgcggccagggcgggcgcgccaactgccccaactcgggcgccaacgccacggccaacggcaccgccgcccccgccgccgccgccgtcgccgacaacgcctcggggaacggcccccctggcggcgcgctctacagctgggagaccggcgacgaccgcttcctcttcaggaatttccacaccggcatctggtactcgtgcgaggaggagctcagcgggcttggtgaaaaatgtcgcagcttcattgacctggccccggcgtcggagaaaggggtcctgtggctgtctgtggtctccgaggtgctgtacattctgctgctggtggttggcttcagcctcatgtgtctcgagctcttccactccagcaatgtcatcgacgggctcaagctcaatgccttcgcggctgtcttcacggtgctctcaggcctcctgggaatggtcgcccacatgatgtacacgcaggtgttccaggtcaccgtgagcctcggtcctgaggactggagaccccattcctgggactacgggtggtccttctgcctggcgtggggctcctttacctgctgcatggcagcctctgtcaccacgctcaactcctacaccaagacggtcattgagttccggcacaagcgcaaggtctttgagcagggctaccgggaagagccgaccttcatagaccctgaggccatcaagtacttccgggagaggatggagaagagggacgggagcgaggaggactttcacttagactgccgccacgagagataccctgcccgacaccagccacacatggcggattcctggccccggagctccgcacaggaagcaccagagctgaaccgacagtgctgggtcttggggcactgggtgtgaccaagacctcaacctggcccgcggacctcaggccatcgctggcaccagcccctgctgcaagaccaccagagtggtgcccccagaaccctggcctgtgtgccgtgaactcagtcagcctgcgtgggagatgccaggcctgtcctgcccatcgctgcctgggtcccatggccttggaaatggggccagggcaggcccaagggaatgcacagggctgcacagagtgactttgggacagcagccccggactcttgccatcatcacatgagccctgctgggcacagctgcgatgccaggagacacatggccactggccactgaatggctggcacccacaagccagtcaggtgcccagaggggcagagccctttggggggcagagagtggcttcctgaaggagggggcagtggcgcaggcactgcaggggtgtcacacagcaggcacacagcaggggctcaataaatgcttgttgaacttgttttcttgcggtgtatggaggccagttgctctgtgggctgtggctgccctgtcattgccccaccccattactcctcaaggaggctgaaggtgacaagagagactgtgcagaggccagggccagacactgcagggtggcagggagggagcacagagcccaggctggacacaggctggcagggctgccttgtattccagagagtgggcaaggcaggggccaggcaagcaagagatgtggggcgagcaagaagtgggcccccaaacccaagccctaagcagggagggtgaagaagccacatttctcttcagagctcagcaacatcacaccaccctgaccctgaggaggctttaccctgtgcctagcaccgcctttacagaaaatcccagggcttagatgcctggagaaacagatccttattataaagaggaggaaaattagggtcacagagatgaatgaagtaacttgcctgtgattacagagctagcaaatggcagagatggggtttgaatcaggactcctgactccaagttcagtcatttcccaagaggccttattccttcccagaagaatttctagagcttttccccacgtagaatatattcttctcctttatccttccatccttccatccatcatccatcactcatccagccattatccatt

SEQ ID NO: 88 - DNA, 670 bp, Homo sapiens
  misc_feature: Incyte ID No: 167601.1
acttattatagaattccaggctctatcaatgaattgaatcctcttcacctgttccagtctctgctgattgattgtaaaagcccggatagcatttttttaaaatctttcccatgttgtatggaataaatatgtcggtgctggaatgcttaggaattttaaattgttcatatggtctaaaagggaaaagttatttgtttttaagattaacttcttttgagattattgctgtccatatttaggtttcaagtactgaatctaatgggagatttgtgcattgatataacagctgtttcctttcatactctgtagattatgtatctgcctaaagggaggctttgaatgtatcataatcatctatattcttaataatggtaaaaagttgtattcagaggatatctttaacattgtatcaacctaaatgcttcttttattaaatttggattaacatacttgcagatttgatttctttttcagttatttgaatatattttttcatttctatgaccatgttacagtttaaatatacaagcagtaaatgttatagtttaaaagtcttggtctttttccttaattttgtaagccatagaaattttaataagactgattatttatttcattttataagttgtgttttccctactaacggagccaacaaataaatattaaaagg

SEQ ID NO: 89 - DNA, 412 bp, Homo sapiens
  misc_feature: Incyte ID No: 341084.1
gtagatggaagcacagacaagacatctacctagacctggagtgggaggacagccaggaagacttcctggaggagagggcaccccagcttgcatttgaaagtcagacagacagggtgtggcaaccaggcagcagtacaggggaacagacaaggctgagacatattcatagttgtcacctactcaacattgccaagccttgttcaaagcacctggaaaggatgatctcatctgtccacgtggcaaccctagaggcaggtccttttactgtccatacgtggcagaggaaggaactgatttagagagaggtgcgggcttgtctaaggggacacagctagtatgtgcaggttctcaggctccatgtgggcttctgtgctctctggctggtacccttgcctcttgtcatgccgcacac

SEQ ID NO: 90 - DNA, 1550 bp, Homo sapiens
  misc_feature: Incyte ID No: 404224.1
gggggcactgaacagtcactttgggactcgcagatggaattttctaaggaaaggcaagtgagttcatccattgatttgctgagcatacagcagccaaggctgtccggggcaagggctgaggaagcgctttcagcccactacagcgaggttccatacggtgacccaagagacacaggcccatcagtctttcctccaagatgggacagtggcctggatgtcactcctgctaacaaggaaccagtgcagaaatccactccttctgacacttgctgtgagttggagagtgactgtgactctgatgaggggtctctgttcactctgagctccataagttcagagagtgcaaggagcaagactgaagaggcagtgcctgatgaggagtccctgcaggacgagagctcaggggcaagcaaggacaatgtgacggctgtagacagtcttgaggaaaatgttaccttccaaacaattccagggaaatgcaagaatcaagaagatccctttgaaaaacctctcatttctgctccagactctggcatgtacaagactcatctggaaaatgcctctgacactgatagatctgagggcctgtcaccctggcccaggtcaccagggaatagtcccttaggggatgagtttccgggcatgttcacttatgattatgacacagctcttcaatccaaggcagcagaatggcattgctcacttagagacttagaattttcaaatgtggacgttttacagcaaacaccaccatgttctgctgaagttccctcagatcctgataaggctgccttccatgaaagagactcagacattttaaaataagaatctttcattaaggaaatattcacagctctaaacaatattcttttaaagatcatggcaggggaaaactaaagccttcacaacaagatcctgaaggagacaacatgaattccaaccaagtggacactgatgcaaatgagggttttgtgggcccacttgagggcgatgattctagaagggttataagctaaacacacttgttaacatcctatggggatgaacctgctcttcagtgtgaaagagaaagaggggaatattttgagatcattccaagaaccatgcaccattattacaagagctccaaacaaaaccagttcactgagaacacaggagcacttcatcaataggttggggtaaatattcagaagagaatctgttgcagttagacgaagtggttctaactttccttctcaaatacagacctggagcaatctgatgggatttggctctctgaaaagaacagctttaggatgacaaagacaaggatgttcaacttgatcatcaaagagaattcaaatgacattttttcatacatattgaagcacttaagtggaaatgctggatagattttaatgaattctgaacacacactagcacaactttttggaggctgatcgtgaaactgcaaaattggaaaagttctgagtaaatataaatgtttttaaataagttatgttaaaagagaagaggggccactttttagaataaagtgtaaattaaaaatc

SEQ ID NO: 91 - DNA, 653 bp, Homo sapiens
  misc_feature: Incyte ID No: 026596.1
  unsure 240-291: a, t, c, g, or other
agcgaactgcttgtttctaaacctcttctccacttacgtggtcttgcagaggattttatacagcgtccccctgccccaccttttttttcagttctccttcatattctaggattatctaaggttttagcttatctcattggtttaagctgcaggaagccaaagcactgacctagattcttctgcacaacccaatctgtgaatatcacattttcctgcagaatcaccacctgaagcctcttnnnnnnnnnnnnnnnnnnnnnnnnnnnnnnnnnnnnnnnnnnnnnnnnnnnnatctaccttgcagtgttgttgtgaggattagccttaatgtacagtaaacaacttattaaaatggattgtgctgctgtcgaatgacagaatgtaaaagggtttagtaaattggtaaattcaagctactactacattttttcccttctgctattcaacctgtccgctagtctgagtgcagcacagttttctagctgtattgtatctctccgcctgttaatacattgcttttctcccatgacatctttaggcccattgccctcagtattcaaagtggccatcttctcttgtgtttaagaggccgtgtcttggctggacacgatgattaacgcctgtagtcccagacactttagtgatgtgaaagt

SEQ ID NO: 92 - DNA, 727 bp, Homo sapiens
  misc_feature: Incyte ID No: 1041038.1
tatttttcaccccttttgtactctgaattggttttaccatgtgtgtaaagactgttgtatgatttttgtagcacaacccttgaatacataaagcacgattggctccccagaaggcaggtgttggccaggcagtggatgcacggtagggcagtgtgcagccctgcatgcacgtggctggtatgccctgcgggcagcagctccccgcacacagtgctgtgagtctctggttcatgtcactctgtggagcaggggctgctccagcacaaagaggtttttgacagggaaaggcagagccagagtcagggcaggccctgggcgggctcctagagagcccaaccaccctctaataaggggtgctctccaccctatctgaggagcaattgggatctcctaggaagtgaaactgttacgtatgtcttattacagaatttccagtggagtgattctggaagaaatgtgtatggcatgttgtgactgctatgtctcatgaaatatttacgtttttatgtaacttttttccattttcagatcatcttttattttaacgcaaaatgacaatatatttttcaattaatttgcccaatatctgtgtttaaatgttttctaatgcacacacgtgttttaaactcattaaaaaaatatgacttagatcccatcccactttcatgttttatattgccaaaactctgcttatgggagaggtgagtcatcttccacttctgaaaca

SEQ ID NO: 93 - DNA, 580 bp, Homo sapiens
  misc_feature: Incyte ID No: 080588.1
aaaaaaaaaaagactttatgcaaagctttcacagccaacttccctttccttaggagggcccagcagctttgtcttctgtcccatctgggtactaaaacccaagcctgttcctggctctgataatccttccactccaccctcctctttgtgtaatactgccaaggggctacaccaagagatatggaaaataaaactgaccagataggtctccggctatttttatctctaattactgtggcaactctggggaaaccccaattgcctggagaggtctactgtgttcaccataaaccatgaagaatttagctaacagtttaattttttacttttcctagaaaatgtgatttttaaccggctcgaaactctgtttccatgatggagtttcacgtttcagacacagcaagcatggagggagatttctgagggccatggactcttgtcatgaaatcacaccacacacataaatagtggtctacaccaccaacacgtaagcaaagtcctggtttgaaactattaggatttggaataataagccaaatcttcgcaaacatataattaaacattagctatgtttcaaaga

SEQ ID NO: 94 - DNA, 1617 bp, Homo sapiens
  misc_feature: Incyte ID No: 014408.2
agaagaaatatgtccttttctttggcatcatggttttgttgagtggcagactgttgaagtgagttgagacttaagaacgccagaaaagttgtctagcctggccccagtagacagaatttgttcttctctcaagtaaaaaattacctttttatagcttttatattatttagatgaaaaaataccattatgaacataattccatggccctttgtgtacaaagcatattttgaattaaatacctcaaggtccacctagacctctatggataaaatcataagtttatgatttttagctcctgtgagtgtttgggggcaaactacacagagaagacatgggtggttcagcccattccactaaaatatgttgccagattctggcctaactcagtattaccttttttcctaaaaatcatttttcacattttgagtaatagggcttatgctttgatgtgaaaaaatgtcaggaaatgagtgtagacaataccctataaaacactagctaagttttatagtgctccatgcctttgtgtaccttccactgattatcttgcctatctttggtgtgtaaactattttcatatcttctaaggctcttaacccactcttttctgaagccgcacagtcctttaatatgtcttgtttccttcctaaaagtttaaagtagagagcaaaaatgcaaatacccaaaggatactgttagtatgtaacttttgtgtgctgctttatttctagagtttgcattttttaattgttcattcacagaaaatcctaatattgccctatatggttggtttttttcctaagtggttaatatttaaacccgctagctgtagcatgataatgtctttgactgagcttatgtagtagaaaggatgtgtctgttttctgggacttttagtcttcacttatttttctataacaatctaattgttaaaaggaaaagatggcttattgacacatatttcattaaactttcactggaagaacagtgggtcatcctactgtggattaagaatactactgacaagcaaaaagcattaagctctgtaactgtctccaacaccaccttcaccccgcctttagtgtaccttagtgtactttagtgtacctattttggcagtacggtgttttccagattctacttgtgccctgcacattgtgaggactcattaaatatttattaaattaatgaatgactaacaggaagagaaagattgtttgtgagtgttaagaatgagtgatgattgagaaattgatggattagtgcaatggattgggaatgaatgatgctttctagtttcgtaatacttgggaagagctattgcatatagagtaagttgatttagactttttttttcttcatttcattaccttgtttaaacttgttaaatcccagccaagaaatgcagctctgtaattgtcaattaactgtattataatatatattaaaaatttgtagagctaaagaacccacttgcattaagaacaccactttctgttcatttgtgatactagaggacagatcctgcatacagagccgaaactgcttttaatcatctgaagaaattctttgatttcagtgacttactgatctgtacctgtgcacatatcattttat

SEQ ID NO: 95 - DNA, 1166 bp, Homo sapiens
  misc_feature: Incyte ID No: 351752.1
gacagagtgagaccatggcacccccctccccttcaaaaagaaatcagcctcataatcaatttctctggattaaggagtaagagcgtctcaagatttgctgtttatagagagggaggctaatagtttgagagagatacagaatctagggagagtgtgggtttttggtctttcagttgtttgccagccttggataaagaatgaagattacttgagcatattatttagagacaagtggagagaataaaggcacatgccagataggagataattaataaagcacttgtccaaaatagaaacttgttgaacaggaagagacgtcaagtataaggagattttaagatgggagaagggaattttgagtgtttgtattggatgacctcagggttcccagtaaagcaggagctgaattcatcgaaggtgatgtgttggtcaggatcaagagagaggttgggagaacaaagtgctaaaatcgttgtggtcaagagtttaaaaagtgtataccagaagagttattgagtgataggggtttgaaataggcaaagctgtaggaaagggggctggaaggaatattaggaggaacactaaatatacttctgaggtctacctcctggtctgtgaacataaaggagctgaaagagtaatggctgaagttctttagtttagctaaagttttttagctaaagctagaattgttgaaagttgtatttgaggaaaaaaagttaaggatacagttgaccgttcgataatgtagcccaattgttgaccaagaagccctacccacaacataaacaggcaataacacatattttgtatgtgtattatatagtatattcttaacaataaagtaaactagagaaaagaacatgtatcaagaaaatcataaggaagagaaaacacatttacagtactgtactgtatttattggtaccatacatttatgttgctgtttacaagatgaagcatctgtctgaaatggccagcagctacagctgtacctatctactgtacatatcaagcaagtcactttattcttataatgtctatgacttctttctttgaaagcgcttccatcatcactgttggcacttcatatgggtctcatggtgttaaggtttacggcattgcactagacacaatgaaaactacacaagagggccgggcacggt

SEQ ID NO: 96 - DNA, 1200 bp, Homo sapiens
  misc_feature: Incyte ID No: 002661.1
  unsure 1170: a, t, c, g, or other
gcttattgctggcaagagggtatagtcctgggaaacaggaaaatatgttgtgatttgaagtgtttctatgttgatgtaatttaaataatcacaacacagataagtttgaagaccacttatataagtatctcaatttttaaaaattctcaaattgttttttttttttgtaattgtaaaatactcaaatttccctggcttatgtttctttagttttattttcattactgtgttacccaggtttgttattcataatatgatgaatcataaaatacagtgatatgactggtataaatgtttctctgtaatttttaatggccttgttttagttattatatgtagttgtttctaaagtgtttgttacagcttatttttgaaacagattcttacattcatgaactagtcttgaagaagacagttctgaaaattttattatcctaatcttttcagtgtactaaaacattactcttatgtattgcagattataaagtagcttatatacaaggagtagtaggtactagggaaatgtttcattttgcataatgaaacattttgcataatgagtggctggattcaatggttttttttttgttccttttgtacagtttggtttcaatgacaaattataaaaatgatattgttcttacatgtgttttgattattttcagtttgtcttgatgtttgtggataatagttaaacttattttcaagtttaaaatattttacaaacttgctatgcaaagtggttttaaaaatctcatttctaagcagttttatttaattatgtatggttcatcaaaatatatgttaacaaaatataagataactgaggaaaattaattgccatttgtgtattccttagtaccagattatcgttgattatgtgtaatggagagagaataaatagctgaaacctaatattcttccagttttttttatgctgccggtttggatcttttttaatcagtccccttttcaaaagtattaccatgtcatgatttgaattgcatttttaaagttttcttatatacatatatttaagatcatagtaaactcccaaatacagtagagggggtaaaatccatatgctaatctgcattagaatatataaagttagatgacctttttaagaatacaaatataggctgggtgtggtggctgacacgtataatncatagcacttctgggaggccaaggcgggca

SEQ ID NO: 97 - DNA, 2038 bp, Homo sapiens
  misc_feature: Incyte ID No: 399162.11
gcgcgtctgcgcctccggccgccgcggctcccggggcctccgcctgcagccggcggcggaacgggggcaggcggctgagacaggcgagctatttgcattccccggcagtcatttttatatgcggaggtaatgaagttgtcagcggcgccccgagtgtggcagagcctgatattcaaatcgccctgcccgctccgcctgctcccgcccgctggtcccgggagccccaggctgcgcgcgcccgcaccgcatcgccgctttgccccgcgaccgcgcgcgcctcctcgtcctcccccgcgcctttgtttccgtctccttctcctttccctcctcttttgtgtcgggccagactcagccccagaaaccagccaccctgccgcgtccgactgccagggatccctcacgccgcgaagtggagtctcgctctgtcgcccaggctggaatacagtggtgcgatcttggctccctgcaacttctgcctcccaggttcaagcggttttcctgcctcagcttcctgagtagctgggactacagtaccagagatgtctccaagagcaccagcaaccccagctatctggatctgaagtggatatgctcagagacatcctggcccaccccaaagaagaggctgctgcactcagaagacgccagagctagccaccacccacactgcaagtctggaagctctgcaaggacccagcaaggcagcctgctcagcgaaggctttgtctcctgtggcaggaagagcaacattaagaacaagaaccccgggctggactacccctgagatttaatgaccagagctgagacccccaagaccacaatgactatggagggctgtcattaccctgcctgaccctctaatgcctctcagttcaaggaggccactgagtgaaactgaaggctggttttccttggaagccagcggcccatccacctgctccacttccctgcctcttgcagcctccgctcaaacactgtcgtggcttggcagcactacaaggcagagtgaaaacagatacttctacccacattcctatctcctctcatttacgcagattaaatgctttctttccttgttttacactgctaggattttcatcaccctgttttttctttctctacatcagctacaagaaaaaaaaaagaggagttactgagcaactaagaagtcacaactgttttcagttttattaatgagttgttatacttattttatagatagagaattaccattataacattgctccattgcccactcatccattcacgcatctgtccatccgtccatccacccatttgtccactccccaaatggtcatcaattgtctactgtgagccaagcaaagtgctccttactttggactctgaatccagtgctctttctacttcaccatagacacatgccccttgagtataagggagcttgattcattcaacaaatatctgttgtccatctccaatgtactggcatattctaaatgcatccaacaaaaaccaaaatgagaaaaaagagaaacccattccttcaaggggattgcattcggactgggggagacagataaaataaaaataatgaagtcaaatatatatgttagtgacatgtgccatgaagaataatgcccaatagtatttcaggggctgccaagctgctctcctgtttcctcttccttggggctgattgcatcccatgatgtgcccaggttttgagatgctcctcgtgaatgaaaataggactgtctggttcctccatccatagcaagggagcctagacagaaataacttctgtgcatttctccagctacatttagggaaaactagaaaatacagaaatatatcaagaagaaaaaaaatttaaaaatgacccaaaatcccaccaaccagagacagctattaatgattgtggtatatttattgtaagtctctttatttctgtcttcatgcaaacacatttttaaagaatggacactggtattatattgtttatacaactctaaatgctgctttttcacttattacaattaggacttttttcatgtta

SEQ ID NO: 98 - DNA, 542 bp, Homo sapiens
  misc_feature: Incyte ID No: 174086.1
gcctctggccttagtggccccagatagcccgaggggttcctctttatctggaggagttagactgggggagtttggttctaggagattcctaaggatggttttctccatgtagcttctgtggttttagatagagagataagttctctctagggcagatttttactttcaagatggtccttaaactagttggattctaactgagtgtcaatagggcagttctaggctaacaggagtcctggggctgccccacaagactcctctcaccctgcagtcatgccagtacccaagcagtcctcaaggtttgtgcagagagaggggaggctggagccaaggccctgttccctcctgcagaaggcgaggcagtgccaggctgcttcctgattggcagaaaaacagcaggaacttgattcctttcttaacccttccttgcggtttctgccacctccactgttctaagtggctgactgtgacaatgtctcgttcccactcccctctcattccccaggctggagaggacctactgggtttctatttaggatctg

SEQ ID NO: 99 - DNA, 422 bp, Homo sapiens
  misc_feature: Incyte ID No: 116731.1
atcaattgcaaagcatggaccttatctgtatactgattaaaaccaacaaacctttaaaaaacttatgtgataatcagggaaatgtaaatctggatatttaatactaaggaggtactgtggttaggtttagtgtcctaatcttttagagcagaggttctcagagtgtggttcatggaccgcctgagagtcaaagctatttttaatagtaatactaacaacatatatttgcttctttcactgtgtttacatttgcactgatggtggaaacatgaataaaactgctgacaccttagcagaactcagggtagcagaaccaaacattactagcagtcatattctccattcaagtgaaggggagaaaagccagttttacttaaaaatgtccttaatgaagcagtgaaaataaatagttttattaaacc

SEQ ID NO: 100 - DNA, 3549 bp, Homo sapiens
  misc_feature: Incyte ID No: 1453971.4
gcggggggcggtggggaccgtgggactcgccgcgaggtcgcgaggggtcgcggggggcggtcagggcccggcccggggcgggccgcgggaaggggatgagttcgggcgcctgccaggccctgcaggtggccgggtcgcaggccagccgcggaagcggagcggtaaccttacccccggcgacagccgccggtcagctgccagagtgtggcgctcccggtggacgcaggggccgggtttcgggcagtctcggcctccaggaggcgcgtcttggtccagggtccgtgaggactggctagatgggggctgcgtggcctttggtggcagggaggaggagggggtctccgaggcgggagaggcgggtttgggaaggaaggtgcgccaggctgaagctggggtcggagaagtgttgggtggagacctcactgtgggtgcgttcctcctctcctctccccaaaacgatggtgttaaaagctagggtcaggatgtggagcgctgcctgggcctcttcctttccgatggttatggagaatgagcctacttcctggacccaaaatccttttcttctgttactcatttatgttggttttaaaaggagctttggggcagagcttacttgttgcctcctacgagagcggctcattttagaactcgtttcttccactacttccctctttgcagccccctcggaaaaccacactgagagttgcattaaaaaccagcatgtaggtatttgtaagtgactttttccctccagtttgtcgcatttaatcaaggagcggttgtagctgcctacgattttgtagaaaattgtgttggcttgagagcaagtcctaagttgagctgtccaaaagcaggtggttggttcgtttgaatttctgctttcagaaaggaaatcgatggggcgtgttgtcagaagttaggggcctacctcatgcatttagcttattttattccatttcctttacctggtgttaagttttctgtcttcagaataagaacaagtgactactgtctttattaagtctcttcggtctttttggttgctgtttggtgacaatggaaaatgggttgaatctattgtgtaatgttatattttagggaaagtcctaagtgcaaaagttaaaaataattttgtgtgtctaatgacattgctttgtacgagtcacaacatggaaatatcaaaatagctagtaacttctagaaagcaaaggaacttctgaaattagtggcttaccatttttgaagattttttttaacataaaacaagatttcccacaaaatcagtgtattaagatacataaaatacattgtgtcgaagagttaagatgtgtgagaagactggctattttgttacaaggtcctgatagtaagacattgagacaaaaaaccttgcaaaacattggtatacataaaggctgatcacgtgactactgtcgtccaaataatacataagtatccaaacctgtttccatgggaataggtttgtaagcttgcggtaacatcggacttaaatacacttttaaaaaaaatgtgccatttggcttagaattaataattttttttaaagcaaaaatggaagcttagtcttcaaggactgataacagctggtaatatttaccattgtttggtgggaatggggttctcatattaggctagcacgctaaacattttcaattacgaaaatgtattaggctcgtgtgctaccctaatataaaaaccccatatttcctcagttgaaatagtcagctgactatcctgaaaagcattgaccctcttttatattttatctgactttcagttcatttttttaatgctagtgggaacttctccaatcagtgtatttttttagtttccttttttggggaacaggaggagctcagtaatttttatgaaatgctttgacctcatatccattaactaattatggtcctagtcagaagaagctagcacccttccctggtgaagttgatacaaatccattgtatgttcctgtcctgcaatgatttacattcagttacagtactagtcaaaactatatatatatgaattctacttaggatccaattttgatatatttaaaaagcaattgagactcatgatagactttatgagcaggtttaacttgtgtggtcgaataaaagcctttaatttaaatggaaaagtaaaagtaacttttttcagtgacttgatttttttttttgttttaatccatttgggttcacgtcagatcatcggtaacaaaaagtggtatctttcagctttgtaaaagaaccctcttaaccaagttcattccctcaaatgggaactaacgtctagagagcaaagaaacttctggaattagtggcttgctgataatctcattttataatttgttcagcaatccagcaagaccaactttttaaaaaaattaataacagtagttttatgaaaactaagtaagaaaacagtttccacctatttctgaggtctcctttagaaggagtaacagacagcttttatttctcttaaagttataaaaatcacaatcgcaagtcacaatgaatactgggaagggaaattacttttgcagagtgatcaagtaaatgatagcgggggctaaacttttttagtaaacttgtgaagattacatacagtaaagtgcataaatcttgagtgtacaattcaatgaatttttataagtaaacacacttgattcaagaacattttcaggaccccataagtccccttcatgtcctgtcttcccagtcattacccataacccccaaggtgacccctttcactatagattagctttgcctgttttgaactttaaataatgtatattccccacaactggcttctttcctttaacattgagatacaaccaagttgttacttgtaacaattttttgtttgtgtgtttgtttatttatttttgagaccagagtctcactgtcgcccaggctgcagtgcagtggtgccatcacgcgtcactgcaacctctgcctcccggattcaagcaattctccacctcagcctcccaagtagctggaattacagatatggctcgtggacagcagaaaattcagtctcagcagaaaaatgccaaaaagcaagctggacaaaagaagaaacaaggacatgaccaaaaggctgctgccaaagctgccttaatatatacctgcactgtctgtaggacacaaatgccagaccctaagaccttcaagcagcactttgagagcaagcatcctaagactccacttcctccagaattagctgatgttcaggcataaggttgtttacaggtgaattcatgacacctttgactcttctactgtctcagaccttaggtaacatacctgcagctgcttttctaacaaactgttgatcagcaaaaatgagtgtttctgtagcccctttatttttgctgatcaacagtttgttagaaaagcaaaaataaaggggctacagaaacactcatttttatgctgttccctcttgggcttcatgcaaagacaattctgtgtacatgtacagttgactctgattcgaaatatgaaatcagccatc

SEQ ID NO: 101 - DNA, 1713 bp, Homo sapiens
  misc_feature: Incyte ID No: 347635.1
gcccagagggaagcatgtctcctgtgtcatctggatgattgcatgcatcagcaatccttgccacaagggggcactgtgtgacaccaaccccctaaatgggcaatatatttgcacctgcccacaaggctacaaaggggctgactgcacagaagatgtggatgaatgtgccatggccaatagcaatccttgtgagcatgcaggaaaatgtgtgaacacggatggcgccttccactgtgagtgtctgaagggttatgcaggacctcgttgtgagatggacatcaatgagtgccattcagacccctgccagaatgatgctacctgtctggataagattggaggcttcacatgtctgtgcatgccaggtttcaaaggtgtgcattgtgaattagaaataaatgaatgtcagagcaacccttgtgtgaacaatgggcagtgtgtggataaagtcaatcgtttccagtgcctgtgtcctcctggtttcactgggccagtttgccagattgatattgatgactgttccagtactccgtgtctgaatggggcaaagtgtatcgatcacccgaatggctatgaatgccagtgtgccacaggtttcactggtgtgttgtgtgaggagaacattgacaactgtgaccccgatccttgccaccatggtcagtgtcaggatggtattgattcctacacctgcatctgcaatcccgggtacatgggcgccatctgcagtgaccagattgatgaatgttacagcagcccttgcctgaacgatggtcgctgcattgacctggtcaatggctaccagtgcaactgccagccaggcacgtcaggggttaattgtgaaattaattttgatgactgtgcaagtaacccttgtatccatggaatctgtatggatggcattaatcgctacagttgtgtctgctcaccaggattcacagggcagagatgtaacattgacattgatgagtgtgcctccaatccctgtcgcaagggtgcaacatgtatcaacggtgtgaatggtttccgctgtatatgccccgagggaccccatcaccccagctgctactcacaggtgaacgaatgcctgagcaatccctgcatccatggaaactgtactggaggtctcagtggatataagtgtctctgtgatgcaggctgggttggcatcaactgtgaagtggacaaaaatgaatgcctttcgaatccatgccagaatggaggaacttgtgacaatctggtgaatggatacaggtgtacttgcaagaagggctttaaaggctataactgccaggtgaatattgatgaatgtgcctcaaatccatgcctgaaccaaggaacctgctttgatgacataagtggctacacttgccactgtgtgctgccatacacaggtgggtcctggaggtaccagcagggaccagaggggatacttgaccttgctttgtcagtgcctgagtctcagtgcccaggtctgtggggctgtaatgctcctccgagggctcactcctcagttgtccttcctgcctttactgactggatcttgagctttgaggacacattgtggcctcctaagatgcaagtggtggacagtcatttgcctacattgtactttagtatttgaaagaaattttctcttaattgtatgtggctggaaccaggcacatagatgatggttgtctatcatttgaatgtttccaggacattagctatttgtct

SEQ ID NO: 102 - DNA, 1227 bp, Homo sapiens
  misc_feature: Incyte ID No: 1401326.2
acttacactcacagaggaagaaatcatttgaagacacagagagaagagggccgaggagagaggtctcagagaaaccaacccaatgacatttcgtcttggatttccagcccccagaattactggaaaatacatttttcttgtttaggccacccaatctgtactactttgttatggcaaccctagcaaactaatgcagtcaccaacccagggtgaaaatgggacattcccaactctagctcttaggccaagcttatttgtaatagattcttgttttcaaaggatatagatattgagattctcaatgtatttgttaaaatacattgtttcttgttaaaagcataagactttgaaatgtctctgtgttgcagatatgtagatgttctgagccataatttttggaaaattctttcaaagaaaaggaaatctactggacaaatagcatgattaatggggatctagtgacaaaataatctgccctaattggatttgtgatgtttttgcaacttgaaattagcttcaaaatccaacaataatacgaaagaatgttcagtatcacgaatcaaattaaaaccataattaaatcacctcctttcattagggtagctactataaaaaaaaaggtaaacaaacagaaaatagcaactgtcggcaaagatgtgggagaaattggaacccttgtgaaaccatcccacagtgttgacaagaattgcatgctgggttctggacagaaatagttccaattaagtactaatcagtctgcacttgggcccacttactcgttgttaaaagtcatgtagccctggatgctgaccatgtacatctgcattgttcctatagataagatctctgacattagaatcataaggcttttgtttaaggatcacttatgatgtttttcacaccccaaattccagcagccagtttgaagactcccacagagtaatgggatcaatatgagaatacagcttcttcatctccctatctcatgacttcaccctctactcttccaaccaatcagtgatctccacattgcagcccattccaacactcttaaaaacccctacccccaaatgcctcagggagacagatttgaggtttcttctcatctcatttagtgaccctatgattaaacccctttccttgctacaacctggtgtctcagcttattatttgctgtgtgcatggggcaatgaacctatttcagttacacttgtgcactgttggcaa

SEQ ID NO: 103 - DNA, 5809 bp, Homo sapiens
  misc_feature: Incyte ID No: 1330204.51
attccctcctccacctcagggcccactgctgctgctctccagcctgcagtttcctctaaggctctggattggctggaagagcaacagagggctgggaaagagcttctatatatacctcaggaggaaaggcatcccagacagttttgaagttttcaaagactggctctgctgttaagaagttgtacttaaagcggaggagctaagccacctgccaaaatgtgcaaaggacttgcagctttgccccactcatgcctggaaaggggccaaggagattaagatcaagttgggaattctcctccagaagccagactcagttggtgaccttgtcattccgtacaatgagaagccagagaaaccagccaagacccagaaaacctcgctggacgaggccctgcagtggcgtgattccctggacaaactcctgcagaacaactatggacttgccagtttcaaaagtttcctgaagtctgaattcagtgaggaaaaccttgagttctggattgcctgtgaggattacaagaagatcaagtcccctgccaagatggctgagaaggcaaagcaaatttatgaagaattcattcaaacggaggctcctaaagaggtgaatattgaccacttcactaaggacatcacaatgaagaacctggtggaaccttccctgagcagctttgacatggcccagaaaagaatccatgccctgatggaaaaggattctctgcctcgctttgtgcgctctgagttttatcaggagttaatcaagtagtaatttagccaggctatgaaatcatcctgtgagttatttcctccataataaccctgcatttcccattaatctacatatcttcccacagcagctttgctcagtgatacccacatgggaaaaatcccaggggatgttgcttactctttttgcccacactgctttggatacttatctactgtccgaaggccttctttccccactcaattcttcctgccctgttattaattaagatatcttcagcttgtagtcagacacaatcagaatcacagaaaaatcctgcctaaggcaaagaaatataagacaagactatgatatcaatgaatgtgggttaagtaatagatttccagctaaattggtctaaaaaagaatattaagtgtggacagacctatttcaaaggagcttaattgatctcacttgttttagttctgatccagggagatcacccctctaattatttctgaacttggttaataaaagtttataagatttttatgaagcagccactgtatgatattttaagcaaatatgttatttaaaatattgatccttcccttggaccaccttcatgttagttgggtattataaataagagatacaaccatgaatatattatgtttatacaaaatcaatctgaacacaattcataaagatttctcttttataccttcctcactggccccctccacctgcccatagtcaccaaattctgttttaaatcaatgacctaagatcaacaatgaagtattttataaatgtatttatgctgctagactgtgggtcaaatgtttccattttcaaattatttagaattcttatgagtttaaaatttgtaaatttctaaatccaatcatgtaaaatgaaactgttgctccattggagtagtctcccacctaaatatcaagatggctatatgctaaaaagagaaaatatggtcaagtctaaaatggctaattgtcctatgatgctattatcatagactaatgacatttatcttcaaaacaccaaattgtctttagaaaaattaatgtgattacaggtagaggccttctaggtgagacacttttaaggtacactgcattttgcaaaaaaaaaaaaaaaaaagtaatcttttagcaaccccagtattccttcactatttcgcttcctgcattagcaaattttacttacagtcaaaagtgcagatttatactcctgacgtgtctcattcacagctaaataataggccataggacttttggtaggtttaaacttttaattctgtatttcatgattataagtcttgctagaattttttctaatctttagtagatttgattaaataatgattcacagaatttagtaacagaatcaaactaagccatgtatgagggtaatcgagatgaggatattaactcaaaagaaatagggtgatttttaaaggattaataaaattctgaaatgttaagtagaagattacattgtctagtcttgtatttcctccttctgttgctctctttcattcacacactctcagtttctcatatttgtagctcatttatttggttatttcctaagaatattgaaagtgaagcaactatgtgactgtattcttcaggtaaacactgactgcgcttgttggattttccctatttttgtgacttcaagaataatatgccctgctgaatacatgccatttcacattctgaaactgggtagagtggttgggtgttctgccaacaattgctagtggtgtgaattcattcatatttgccagtattgctcacttcaaagaaactccttcatcaagcagtccagagctaggccagatcaatgctacaatcatgaagttctcattgcatgcaattgtgtaggattgacaaggaactcagataaaaatttccagggtgcacttccagaaccagcttcaacatatgtctacattgcccccaagttaataaagtgccaaccctttactctctcatacagccagaaatgttagaaatccaaaatcttggtgcattattttttcataaacgctaaaacatttgaagaaacaatttaattatttaaaattcaagtattttattcacattatttgcaatatccaaatgtttaaaaattcccagataattaactagctattacagatctcacctagagggttgatgttatgaagactccagtggactgtactcacaaattgactggacaccctatgaaagtgggtagacctctcagcggaaaataagaagggcttttacctacagggcaggacagggtcccatgagagcagttctgtggagatataaaaagaatggaagaaggaatgccttatagtgatattgtgacattatatctatatatctacatatatctatctatctatatctacatctatataatcttacatttaaaattgtattcctacacatattagaaactcttctaataaatgaagtaaaaaaattaaaaagaatacaaatattccagccccaaatgagaaatcaaacatattaaaattgttcaagaaaatttctttgaacacttttgaaagtttttggaaacttagaaaagagggaaaaaaatccagtgttactagtaatttccatggtaatacagataaaatacattcttttaattctgggaaattagaaaaagtggggtgatctttccaggaaaaacatgtgtaacatctgcttatcactccagctccctcctcccctcctctccacgttcccttgagtaaatgtctgggaaagcatgaagcttgatgcaagaaccctgttgtactggagttttcctcccctgtgaaaacgtaactactgttgggagtgaattgaggatgtagaaaggtggtggaaccaaattgtggtcaatggaaataggagaatatggttctcactcttgagaaaaaaacctaagattagcccaggtagttgcctgtaacttcagtttttctgcctgggtttgatatagtttagggttggggttagattaagatctaaattacatcaggacaaagagacagactattaactccacagttaattaaggacgtatgttccatgtttatttgttaaagcagtgtgaatagccttcaagcatgtgaataatcttccatcttccccgccacacatacacaaacacactttttgtttctttcaggtagacaccttttaaaatgcagaactaactgaggcatttcagtaactttgctttcaaatcaataaagtcaaatgtatggaaacattttgtgccctactctccataccccgtgtactcaaattctctactgtatgaattatgctttaagtagaattcagtgccaaggagaacttggtgaaataaattattttaattttttttttatcctttacaaagccatggattttatttggttgatgtgtgctctgtacacaagccatttcaataggatggagctgttaattattttccaaagagtaatagacatgcaaaagtttcaataaaaactgggccattaacaaataaattaataaactaataagcattcccttctaggtttttgccaaactgcctatccaataacaaatttgagaatcgttgaaaaagctagttatatttcagagaaatgattttcattattgaaactgttctccctagcaggccattttccctttttcctgggagtttagcaagtttaggagagaatagtcatgaaaagaaagggaagaaaggggagaagggaagaggttaaaaagtaagtgctcagacctatgaacgtaatccctttgctagaaatatttaagagcagctcagcttggttgaaactgagttttgtcatcttccatatttgcaggaaggtattttctgacttgcaatgcagctagatgtaaaattttattttatcatactagaaagccttgactagaaaaatgaataaatattgagggtttcctgtccatatctggcttgcatgtgccagaaagcagagaatagaaaatgtaatctccaacatccaagcatcgaaacccaaggggtaggcaattctatgtaggttttggacatgaagtttggtgcatcttggtttatgctggctcaactgctattaaacctctctggcttatagtctcttcattctattagacaagcacgtatcgaacacttgcttcgcacaaggctctttagttaacaatttagcagctactgtttgtgttaaacacacttttcaccaaataggttctgaggcaaacgagagcaatgactatttaaagaaaggctttcccagcatcacttacacatcccaaaactaaaaagatcaactcttccaactgagaaaagactcctggctttgaatggaaacttacagcagagagtcacaggccacggcaacaacaacgacaacaacaaacatttggaatattattctcaactcacgttttaataatacatcttattatttttctagtagagaaactacaaatcagcctcttcaacatttatatacagtttaataagcctcttgcaagttacttgttctctcacctgaggtatttttttcctccccaccttgcccctgttcctcccttcctcttctccctttgcaagaggaaatatttaacatatttgggtccaacttcaataatgtaataattaatacattaaaagcatttaacttcctttctagaaaaatgcacaggctaaggcatagacaaaacaaagagaaatgctgagaaatttgccactggagacaagcaatctgaataaatatttgccaaaagttctttttatgtcatatagtgtcaggatttgaaggagctatttttttttaatgttgcaactagcaactcatcttcggaagacacagccaggagaatgaagtagaagtgaaaggtttataaatccatttgtaagcatttatcccatatattttaaattcaagaaaaattgtgtttatctttagaattttgtattcaatactttatgtactatgtgactcatgcttctggataaataaagcaccaaatatgtatctgtaaccacaatcacacatattatattaaatatatatctatataacagccaaa

SEQ ID NO: 104 - DNA, 609 bp, Homo sapiens
  misc_feature: Incyte ID No: 1327351.31
ccctactgctgctacacaagaccctgagactgacctgcaggacgaaaccatgaagagcctgatccttcttgccatcctggccgccttagcggtagtaactttgtgttatgaatcacatgaaagcatggaatcttatgaacttaatcccttcattaacaggagaaatgcaaataccttcatatcccctcagcagagatggagagctaaagtccaagagaggatccgagaacgctctaagcctgtccacgagctcaatagggaagcctgtgatgactacagactttgcgaacgctacgccatggtttatggatacaatgctgcctataatcgctacttcaggaagcgccgagggaccaaatgagactgagggaagaaaaaaaaatctctttttttctggaggctggcacctgattttgtatccccctgtagcagcattactgaaatacataggcttatatacaatgcttctttcctgtatattctcttgtctggctgcacccctttttcccgcccccagattgataagtaatgaaagtgcactgcagtgagggtcaaaggagagtcaacatatgtgattgttccataataaacttctggtgtgatactttc

SEQ ID NO: 105 - DNA, 1716 bp, Homo sapiens
  misc_feature: Incyte ID No: 1327351.35
  unsure 251, 681-709, 884-1007: a, t, c, g, or other
tttaataggttaaccgtcatgtatcgccatctatttatgcttcataatcctcagacagagaatttctcctcaaaaggaattttaaaatctaccaagtagaaatacagaaattaagaaaggcaaagtgatcgtccaaactcaaaaccacaaagcctatatgacaagtctctaagacacatggattgattactgatttcatttgatcaggaagttaatgaaatctactttatactctcctttaatttttgccnatctccgtttatatgagttgcataagttaaggcactttcaaatatatttgtgtcaaggaatattcacggaaatatttccagctatgtgtcgctaaaactgcatttatttattttctgttctaagatcccttcattaacaggagaaatgcaaataccttcatatcccctcagcagagatggagagctaaagtccagagaggtcagtaacaaaacttcatgaggagtggtcatttttcccagtgtagatcacagatctgaattggagtgggaaacagctttttcatcatatacattatttctaattgtatctttaaaatcaaaaaacttaaaagcaatattcagaaaacaactgaattattagaaaattatttggggaaagatccggaaaggagaaggaaggaggagagaaaggaggacagaaagaaaactnnnnnnnnnnnnnnnnnnnnnnnnnnnnntctccgtggttcgtgcctttcccttcccgtggttttttttgggtgggtgggctgggttttctcgtgagacagaagtctcacttcgtgtggcccagacgggattataggggcactatctgcgggccttcagccttcccaagttagcggggattatgggcacgtgctaccagtgtcnnnnnnnnnnnnnnnnnnnnnnnnnnnnnnnnnnnnnnnnnnnnnnnnnnnnnnnnnnnnnnnnnnnnnnnnnnnnnnnnnnnnnnnnnnnnnnnnnnnnnnnnnnnnnnnnnnnnnnnnnnnngcctggagccaccgcacccagcctctccctgttctttaaatatcccttaatataggggggcatggagagaaagtctctccaatattttcttcttcttttccatttttgtatttttccactttatccttctcaattttggcctcttcttccactttctaggatccgagaacgctctaagcctgtccacgagctcaatagggaagcctgtgatgactacagactttgcgaacgctacgccatggtttatggatacaatgctgcctataatcgctacttcaggaagcgccgaggggccaaatgagactgagggaagaaaaaaaatctctttttttctggaggctggcacctgattttgtatccccctgtagcagcattactgaaatacataggcttatatacaatgcttctttcctgtatattctcttgtctggctgcacccctttttcccgcccccagattgataagtaatgaaagtgcactgcagtgagggtcaaaggagagtcaacatatgtgattgttccataataaacttctggaaaagaatgtaaatttgaggatttttttgccaatagtttatagaaaatatatgaaccaaagtgatttgagtttgtaaaaatgtaaaatagtatgaacaaaatttgcactctaccagatttgaacatctagtgaggttcacattcatactaagttttcaacattgtgttctttt

SEQ ID NO: 106 - DNA, 2187 bp, Homo sapiens
  misc_feature: Incyte ID No: 332723.6
cttatgcatcggatttatttttccaaatcaagaggacagtgatagatgcattttccccaggctgtctcagaaaggtcgctaaatgtatactgttgtcagaattgctgagatctccccccactttggtttttgcagcagtaaaaactctttccactgtgacttattttccccaggctgtctcagaaaggtcgctaaatgtatactgttgtcagaattgctgagatctccccccacttttggtttttgcagcagtaaaaactctttccactgtgacttattttctctctcaggcagccagccacctggtcccttgtgctgactctagcacagtggccaggatccaatacgagtccaggggtgaccgcaggatggtgggggcagcgggcttctccacctaccccagccaccaaggccctgacgcactgcctcctgcaccttcagcacatccctgtgcacagctggaagggtgcatggcccgctcacctttgttcagatgggtggaaacgctgatgataccagctcctccctgccgtgcccctgccacggagcaggcattgtgaactggctggtgtttgcagtcccacgtggcatggcctccagcccaacccacagtggagactggagacagggcaatgagtctggtcgggggcacgtggacatgccccataggggccccacccagacttaacaggcaaggtcctgggcattgcgcgacgcaggactcaatgctaaagcaagcctgcctggctctgtgccagggcccctcttctgatttacacatcccatttttacacagacccttccttcttaataaaggctgacagttctgttggcagccaagaacccacaccatgaagacagggagtgaggggcctttgtgcccaactccagcacagctgcgttctggggtgtgtgagaggcatgttcgtgtctgtgcgctggtggtctcgtgagacagttccgaggacggggaaattgcagggtggtgggggcgtgaggcttatatgtggaactgatgcagagttcgcctgcagacggatctggatatacactatgtataattgttacgtgtaatttaaaatatatctgtttgccatcgtcatgagaagattatatgtaaggctctgaagggagagggagatgtacattctgccaggctcctggggaccttatccgagtcatgaaattgatgactgttgatccagtggtgcaagaagctacactccatgtgtcatcacgcttatgactcctaatgtatttttaaggcaaaaaatgtcagccgactccatcttcacccctcgattcctcgagtccagcctttctgtgccagtgcttcactgagccacaacgctctcgccatcgggacccggctgggcctggagtctcggggcacagttgccatggagccctcctgggtcattctacaaatgtgctgagtgccagctgaaaaccccacaggagatggagtaccttggccaagcttaaagagaagattttctcagggtatttattagtgtgtccagcagggtcaggaagcaggatggaaagatgcattcagactgttaatttattaacaaggcaaatgattttgtgtttcttgatgacagactattaagtttgggacttattttcccatttgagaagttataatatatatttaagatgataagtttcctgcttaagttgtgcctttcagcttcaatgagtttaaggagcactaagggtaatgataccaatgagggttggtttattatcaaacctgaatagctgtggtttctccagtaaatattttcttctactgaacatggagccattattaagagttgtgtgttttttattatgtacatttgtatatttttttgcttgtttgatgttctatttttctaatagttttcttttagtttcttaaagttgtgatactagatttagattctgatgctaactgcaaatcaggttggtctctgctgggtctctcctgcttttattttactttaaggacaagtgtagttgtcgtccaccacctttcaaaaaatgtgaaactgccctgcctcccctttttgctgacaacactgtgtacattgaccacttcctaccatactttatgttgtaaaatcaaactcttttgtggtacattatctcatgcttctgcaaattcgaataaattctatggcttccatgtgaaaaaaa

SEQ ID NO: 107 - DNA, 930 bp, Homo sapiens
  misc_feature: Incyte ID No: 1184503.1
taccaccaatgccccttcagatttcaaatccactgtgttgtcccccagccaagtggattctcctctgcaaattggtggtggcctcatgcaagatccaggttaccgtgtccagctaactcgagacaggaaaagataggctcaggaaagagaggaagggtgtgccctctgtctgtgctaagggaggtggggaaggagaaggaattctgggcagccccttcccactgtgctcctacaatgagcagttcttcgggccagggacacggctcaccgtgctagaggacctgaaaaacgtgttcccacccgaggtcgctgtgtttgagccatcagaagcagagatctcccacacccaaaaggccacactggtgtgcctggccacaggcttctaccccgaccacgtggagctgagctggtgggtgaatgggaaggaggtgcacagtggggtcagcacagacccgcagcccctcaaggagcagcccgccctcaatgactccagatactgcctgagcagccgcctgagggtctcggccaccttctggcagaacccccgcaaccacttccgctgtcaagtccagttctacgggctctcggagaatgacgagtggacccaggatagggccaaacctgtcacccagatcgtcagcgccgaggcctggggtagagcagactgtggcttcacctccggtcaagagaaaggattccagaggctagctccaaaaccatcccaggtcattcttcatcctcacccaggattctcctgtacctgctcccaatctgtgttcctaaaagtgattctcactctgcttctcatctcctacttacatgaatacttctctcttttttctgtttccctgaagattgagctcccaacccccaagtacgaaataggctaaaccaataaaaaatggtgtgttgggcctggttgcaaaaaaa

SEQ ID NO: 108 - DNA, 771 bp, Homo sapiens
  misc_feature: Incyte ID No: 410610.1
tgatttcttcacctcctttttaagttttgaagaaaattcacttgctggcaaatattaatagaagcttcttattccaaaatttatctgctgtgctcaggagagtggcagaaagaagaaaacttcggctttgatatcgtttcagttctctctctgaactggcatcgtgcccagggtgagctgtcagctggagctagtggtttctgtggctgccaatttaacacaggttcttaagaggctttcggaaccctcttagaaacctgccctagtaagcccagcagagcaactgccctgtagttctcttgcctggagaaacctggctgtcttctggatccttcttaatcctctttgaccctgttctcaaacaggctctgaataaatcagagaagaaggttctctggagacttctgtacagcacttaaagtgtcttattttgcttgtctgaagacgtcatagcccttgggaaattttagctgaaaatggccactccctccttcaacatcagagaaactaaaatatagagatatccacagcaaggccagagctagagaaaaacctcataaatcctaaattcctgaaatttctaataaccacactgctaaatatattcttcatgtttttagactctttcctcttcttccatccctgtatttaaactatcacagtgtctaaattgataaataataacataatgaatcatggataaatattgatataatgaatcttttttttttaatttcagaatcacatgaaagcatggaatcttatgaactt

SEQ ID NO: 109 - DNA, 3684 bp, Homo sapiens
  misc_feature: Incyte ID No: 986073.1
accgcgacaagaagtatggcttctgccctgagaccgccatgtccactgttggtgggaactcagaaggtgccccctgtgtctcccccttcactttcctgggcaacgctgaaggacagccctgcaagtttccattccgcttccagggcacatcctatgacagctgcaccactgagggccgcacggatggctaccgctggtgcggcaccactgaggactcccattttgatgacgatgagctatggaccttgggagaaggccaagtggtccgtgtgaagtatgggaacgccgatggggagtactgcaagttccccttcttgttcaatggcaaggagtacaacagctgcactgataccggccgcagcgatggcttccgcatggtctcgatggtattctggtcaagatcacctgtctggggcagtccaaagaacttctgcatcttctttagtgtgtccttcagcacaaacaggttgcagctctccttggggcagccatagaaggtgttcaggtattgcactgccaactctttgtccgttttgggggcgacatcgcccatcatcaagttccccggcgatgtcgcccccaaaacggacaaagagttggcagtgcaatacctgaacaccttctatggctgccccaaggagagctgcaacctgtttgtgctgaaggacacactaaagaagatgcagaagttctttggactgccccagacaggtgatcttgaccagaataccatcgagaccatgcggaagccacgctgcggcaacccagatgtggccaactacaacttcttccctcgcaagcccaagtgggacaagaaccagatcacatacaggatcattggctacacacctgatctggacccagagacagtggatgatgcctttgctcgtgccttccaagtctggagcgatgtgaccccactgcggttttctcgaatccatgatggagaggcagacatcatgatcaactttggccgctgggagcatggcgatggatacccctttgacggtaaggacggactcctggctcatgccttcgccccaggcactggtgttgggggagactcccattttgatgacgatgagctatggaccttgggagaaggccaagtggtccgtgtgaagtatgggaacgccgatggggagtactgcaagttccccttcttgttcaatggcaaggagtacaacagctgcactgataccggccgcagcgatggcttcctctggtgctccaccacctacaactttgagaaggatggcaagtacggcttctgtccccatgaagccctgttcaccatgggcggcaacgctgaaggacagccctgcaagtttccattccgcttccagggcacatcctatgacagctgcaccactgagggccgcacggatggctaccgctggtgcggcaccactgaggactacgaccgcgacaagaagtatggcttctgccctgagaccgccatgtccactgttggtgggaactcagaaggtgccccctgtgtcttccccttcactttcctgggcaacaaatatgagagctgcaccagcgccggccgcagtgacggaaagatgtggtgtgcgaccacagccaactacgatgacgaccgcaagtggggcttctgccctgaccaagggtacagcctgttcctcgtggcagcccacgagtttggccacgccatggggctggagcactcccaagaccctggggccctgatggcacccatttacacctacaccaagaacttccgtctgtcccaggatgacatcaagggcattcaggagctctatggggcctctcctgacattgaccttggcaccggccccacccccacgctgggccctgtcactcctgagatctgcaaacaggacattgtatttgatggcatcgctcagatccgtggtgagatcttcttcttcaaggaccggttcatttggcggactgtgacgccacgtgacaagcccatggggcccctgctggtggccacattctggcctgagctcccggaaaagattgatgcggtatacgaggccccacaggaggagaaggctgtgttctttgcagggaatgaatactggatctactcagccagcaccctggagcgagggtaccccaagccactgaccagcctgggactgccccctgatgtccagcgagtggatgccgcctttaactggagcaaaaacaagaagacatacatctttgctggagacaaattctggagatacaatgaggtgaagaagaaaatggatcctggcttccccaagctcatcgcagatgcctggaatgccatccccgataacctggatgccgtcgtggacctgcagggcggcggtcacagctacttcttcaagggtgcctattacctgaagctggagaaccaaagtctgaagagcgtgaagtttggaagcatcaaatccgactggctaggctgctgagctggccctggctcccacaggcccttcctctccactgccttcgatacaccgggcctggagaactagagaaggacccggaggggcctggcagccgtgccttcagctctacagctaatcagcattctcactcctacctggtaatttaagattccagagagtggctcctcccggtgcccaagaatagatgctgactgtactcctcccaggcgccccttccccctccaatcccaccaaccctcagagccacccctaaagagatcctttgatattttcaacgcagccctgctttgggctgccctggtgctgccacacttcaggctcttctcctttcacaaccttctgtggctcacagaacccttggagccaatggagactgtctcaagagggcactggtggcccgacagcctggcacagggcagtgggacagggcatggccaggtggccactccagacccctggcttttcactgctggctgccttagaacctttcttacattagcagtttgctttgtatgcactttgtttttttctttgggtcttgtttttttttttccacttagaaattgcatttcctgacagaaggactcaggttgtctgaagtcactgcacagtgcatctcagcccacatagtgatggttcccctgttcactctacttagcatgtccctaccgagtctcttctccactggatggaggaaaaccaagccgtggcttcccgctcagccctccctgcccctcccttcaaccattccccatgggaaatgtcaacaagtatgaataaagacacctactgagtggccgtgtttgccatctgttttagcagagcctagacaagggccacagacccagccagaagcggaaacttaaaaagtccgaatctctgctccctgcagggcacaggtgatggtgtctgctggaaaggtcagagcttccaaagtaaacagcaagagaacctcagggagagtaagctctagtccctctgtcctgtagaaagagccctgaagaatcagcaattttgttgctttattgtggcatctgttcgaggtttgcttcctctttaagtctgtttcttcattagcaatcatatcagttttaatgctactactaacaatgaacagtaacaataatatccccctcaattaatagagtgctttctatgtgcaaggcacttttcacgtgtcacctattttaacctttccaaccacataaataaaaaaggccattattagttgaatcttattgatgaagag

SEQ ID NO: 110 - DNA, 1199 bp, Homo sapiens
  misc_feature: Incyte ID No: 1102234.29
gatctggtaaagcccccatcctggtctgacactgtcatgggtaccagtctcctatgctgggtggtcctgggtttcctagggacagattctgtttccacagatcacacaggtgctggagtctcccagtctcccaggtacaaagtcacaaagaggggacaggatgtaactctcaggtgtgatccaatttcgagtcatgcaaccctttattggtatcaacaggccctggggcagggcccagagtttctgacttacttcaattatgaagctcaaccagacaaatcagggctgcccagtgatcggttctctgcagagaggcctgagggatccatctccactctgacgattcagcgcacagagcagcgggactcagccatgtatcgctgtgctagcagccttagcggcaccggggagctgttttttggagaaggctctaggctgaccgtactggaggacctgaaaaacgtgttcccacccgaggtcgctgtgtttgagccatcagaagcagagatctcccacacccaaaaggccacactggtgtgcctggccacaggcttctaccccgaccacgtggagctgagctggtgggtgaatgggaaggaggtgcacagtggggtcagcacagacccgcagcccctcaaggagcagcccgccctcaatgactccagatactgcctgagcagccgcctgagggtctcggccaccttctggcagaacccccgcaaccacttccgctgtcaagtccagttctacgggctctcggagaatgacgagtggacccaggatagggccaaacctgtcacccagatcgtcagcgccgaggcctggggtagagcagactgtggcttcacctccgagtcttaccagcaaggggtcctgtctgccaccatcctctatgagatcttgctagggaaggccaccttgtatgccgtgctggtcagtgccctcgtgctgatggccatggtcaagagaaaggattccagaggctagctccaaaaccatcccaggtcattcttcatcctcacccaggattctcctgtacctgctcccaatctgtgttcctaaaagtgattctcactctgcttctcatctcctacttacatgaatacttctctcttttttctgtttccctgaagattgagctcccaacccccaagtacgaaataggctaaaccaataaaaaattgtgtgttgggcctggt

SEQ ID NO: 111 - DNA, 1239 bp, Homo sapiens
  misc_feature: Incyte ID No: 1102234.28
gactgttctgtgtcaggacaaggacgtccgtcctcctctcgctcacagtgaccctgatctggtaaagctccctgactctgtcatgggcaccaggctcctctgctgggcagccctgtgcctcctgggggcagatcacacaggtgctggagtctcccagacccccagtaacaaggtcacagagaagggaaaatatgtagagctcaggtgtgatccaatttcaggtcatactgccctttactggtaccgacaaagcctggggcagggcccagagtttctaatttacttccaaggcacgggtgcggcagatgactcagggctgcccaacgatcggttctttgcagtcaggcctgagggatccgtctctactctgaagatccagcgcacagagcagggggactcagccgcgtatctccgtgccggcgttgcggcgggatggagctcctacaatgagcagtattttggcccaggcacccggctgacagtgctcgaggacctgaaaaacgtgttcccacccgaggtcgctgtgtttgagccatcagaagcagagatctcccacacccaaaaggccacactggtgtgcctggccacaggcttctaccccgaccacgtggagctgagctggtgggtgaatgggaaggaggtgcacagtggggtcagcacagacccgcagcccctcaaggagcagcccgccctcaatgactccagatactgcctgagcagccgcctgagggtctcggccaccttctggcagaacccccgcaaccacttccgctgtcaagtccagttctacgggctctcggagaatgacgagtggacccaggatagggccaaacctgtcacccagatcgtcagcgccgaggcctggggtagagcagactgtggcttcacctccgagtcttaccagcaaggggtcctgtctgccaccatcctctatgagatcttgctagggaaggccaccttgtatgccgtgctggtcagtgccctcgtgctgatggccatggtcaagagaaaggattccagaggctagctccaaaaccatcccaggtcattcttcatcctcacccaggattctcctgtacctgctcccaatctgtgttcctaaaagtgattctcactctgcttctcatctcctacttacatgaatacttctctcttttttctgtttccctgaagattgagctcccaacccccaagtacgaaataggctaaaccaataaaaaattgtgtgttgggcctggt

SEQ ID NO: 112 - DNA, 1184 bp, Homo sapiens
  misc_feature: Incyte ID No: 029061.1
attagctacactttcttcactagcaagataaaataatttccacattttctagttttactttgtagaaataactctctgtaattggactgtattcaacgaaaacttagtaagttgtaattatgcctcaggtatgtttctatgcactgagtgaagagtggagataaaaatagagtttagattttcctttactttttaaataggttgttgcctcttatatatttattctatgatgcaaatgtcactatcctaattcctcagtttatgtttaacagcacacagtggcacttctatgattcaaatacatttgataccctttgaaatcaatcagaatactgcaaaattaatttttctaaaacaatgcttttatcgttatttctcctgttgaatcatcagtacaatttccaaatgaaagcacttaaaataatctcatattacaatctttctctaacagaaccatgatgtaaggacagtgataacaaatatctgacaatgatatgattatttcctcatccatggaaattttccttaataaactaaagggctattttctaaaaagccaaagcattgcttacaagaacttttcatcatgacatggatagacactcagattcatacattcaaagggaagtgtcatgtattccctttcaatccaccctattctattgtgttatcttcctaaattattttctatctacattcttcattctctttcccattgaccctatgttctgtgtgataaaaattgcgtcattggaggcttttgaaggttaagtattatgccccatttcaccattaatcaacatacaacccttctccatattttgtaattcctttcatatacagaaaaaaagatactataatttcttcaaaatgcttgatattaatgatatatgggaaaacaattattttgtgcagcaatcttcagataactgggaaaggccggggaaaaagagagatactggtggttatcaatgacccatgtataaattgtttttattatgtaagctgtcttcacaaatgtcttcttatgtatgatcattagaactgttttatatatatatgtaaaatttccacattatcgagacattactttcagcagtgaagtaatccttttttaactgccacttaatgaattcaataaaatataatttattgtattttgctataataaactattgatgact

SEQ ID NO: 113 - DNA, 2414 bp, Homo sapiens
  misc_feature: Incyte ID No: 233180.39
atgatctcctcctcctttttccaaggctgcacttcttggaagtgaagccggtgtagagaggagagagagtgaacagggagcggggcttttgtctgttggtctccctggactgaagagagggagaatagaagcccaagactaagattctcaaaatggtttattacccagaactctttgtctgggtcagtcaagaaccatttccaaacaaggacatggagggaaggcttcctaagggaagacttcctgtcccaaaggaagtgaaccgcaagaagaacgatgagacaaacgctgcctccctgactccactgggcagcagtgaactccgctccccaagaatcagttacctccactttttttaatcgtaacacctccatttgtattacatatggtgtatgggtattgatgaggtcatggtatcatatatgggatttttttctgtgtaaatcatcaagtataagaagaaactatgggactctgagccttgctttagagaatttacagtggacaaataggtgtcatcaaaccagtttttaatcattctgactcaagtgaaaacgctcagaatttcacactgtgaatccacgtttacaacccttacaggtgggccttcaggcctggttcgctacaacaatgtcttccacaactcaaactcccaccgcgctcacacaaccggtccactcctgccttttcactcacacagctcccgactgcttcttgcagaggctgagagtcccccccccaccttttttttcatttagatgtaacaaacctagtagtttatgttcatcaattgtctgtatatctctatattttatccatgtactcttttgatgtatagaagtagtttgaaactcattgtttccttgtggtaagtgaccgagatgctgccacaggacctgagacactgatgaatggtgctattttggactttcaacatgctccttggcgaggtagctctgatggagttattttttatttccatgttctaagaaggtgttggtactctgtttccctgaatgttgttctctagactggattgacttgttttccttgtgtcttcagtgtggctttcttcctcagtgttgtaggttgagcgaatgctaccagagtgtgagagaccattgtctcgttggctggcgctcacggacatgcagtcacggtagcgggagcaatcacaaaactgtaatttacttaccaaatctcttcctttccatagcctcgcctgcctgacttacttagagaaagaaaagcaataattttacaggcattttgaggtgtctctttctttgggttctttctgtttgaaaggatatttgtcgaaaaaaagagcaaaaccgttttaaataaactccccctggaaaaaaacccaaaacactggcatctgagtaggaatatgaaaatgacaccttttccaaatattaaattggaaaacaaggtctacaaaatcatgatacttttttaaaaggcagagcattcttttttcggcaattttgataagcaaggtgtagatttacatttttgtccttgctcccaacgaaatggataaacaaaaataacttaccatctactcatggaatgttgttgtgttagccagtctgaaagcccaccttaatttttatataactgtctttagctcttcttttgacagggcaggccttgttctgaactgtttcgcttctgactgttaaacaccgatgacgcatgcactgcacttcttcgttttcttcttgctcccccattggcctgagtttcttgtgcattactcctctccctccttcgttagaataggtatatcagctgtgtaaatagagcaagaaaacagtattctgcatctgtggcatttatgtagagttgcagttgtgtactgctgaaaatgcaggcttttgtaacagtgtgatctttactgatgcactcatgacaagtacccaatgttacaaaagcctgcattttcagcagtacacaactgcaactctacataaatgccacagatgcagaatactgttttcttgctctatttacacagctgatatacctattctaacgaaggagggagaggagtaatgcacaagaaactcaggccaatgggggagcaatcacaaaactgtaatttacttaccaaatctcttccttgccgtagcctcgcctgcctgacttagagaaagaaaagcgataattttacaggcattctgaggtgtctcttagggttctttctgttggaaaggatattggtcgaaaaaaagagcaaaaccgttttaaagtaaactccccctgggaaaaaaacccaaaacagtggcatctgagtaggaagtatgacaatgacaccttttccaaatattccgttggaaaacaaggtctacaaaatcatgatacttttttaaaaggcagagcatgcttttctcggcaatattgataag

SEQ ID NO: 114 - DNA, 706 bp, Homo sapiens
  misc_feature: Incyte ID No: 010317.1
atgaaagggatggtgagctgcagagctttctcacctaacctctagctacagggcttcgcctattgagttgaccatagtgttcgccttgacctacttttgaacctagtgatgggatgtgttgcactaatagatcttctgttttattcagaaagggcgtcggggaaatttgagcctgggtttatctgtctccagatcagtggggtgaggggagtttctcccaggcccaggcaggaagggggtgcattgtctgtagaaaatgttttaggaaactaatctttggccaggtgggtttgttttttctaatcacttgcactggcaatcctaaacaatgccagggataaattactcttccctgcagggacctgcagggacggacactctcgctgcctgcgccctggtaaaccactgcaccatcttaaccactgtgttggttttggagcagatggaaagtggctccataatctaaatgaagcaagacagccttgaactttgatttcctacatatttccttaaatggccttttttgagagatttgggtttttctcaggccttctcttcctctttccttaattcctgcttgcttttctcacctctctgcataggtcagatttgttgtttttttcactaataaattgtattttcaattaattcaattagttgaatattcatgcttattataaaaaacaaaattcaggaaagtaataaa

SEQ ID NO: 115 - DNA, 2587 bp, Homo sapiens
  misc_feature: Incyte ID No: 2007614cB1
gcgagccatgtggcgcgtcttgtttctgctcagcgggctcggcgggctgcgcatggacagtaattttgatagtttacctgtgcaaattacagttccggagaaaatacggtcaataataaaggaaggaattgaatcgcaggcatcctacaaaattgtaattgaagggaaaccatatactgtgaatttaatgcaaaaaaactttttaccccataattttagagtttacagttatagtggcacaggaattatgaaaccacttgaccaagattttcagaatttctgccactaccaagggtatattgaaggttatccaaaatctgtggtgatggttagcacatgtactggactcaggggcgtactacagtttgaaaatgttagttatggaatagaacccctggagtcttcagttggctttgaacatgtaatttaccaagtaaaacataagaaagcagatgtttccttatataatgagaaggatattgaatcaagagatctgtcctttaaattacaaagcgtagagccacagcaagattttgcaaagtatatagaaatgcatgttatagttgaaaaacaattgtataatcatatggggtctgatacaactgttgtcgctcaaaaagttttccagttgattggattgacgaatgctatttttgtttcatttaatattacaattattctgtcttcattggagctttggatagatgaaaataaaattgcaaccactggagaagctaatgagttattacacacatttttaagatggaaaacatcttatcttgttttacgtcctcatgatgtggcatttttacttgtttacagagaaaagtcaaattatgttggtgcaacctttcaagggaagatgtgtcatgcaaactatgcaggaggtgttgttctgcaccccagaaccataagtctggaatcacttgcagttattttagctcaattattgagccttagtatggggactacttatgatgacattaacaaatgccagtgctcaggagctgtctgcattatgaatccagaagcaattcatttcagtggtgtgaagatctttagtaactgcagcttcgaagactttgcacattttatttcaaagcagaagtcccagtgtcttcacaatcagcctcgcttagatccttttttcaaacagcaagcagtgtgtggtaatgcaaagctggaagcaggagaggagtgtgactgtgggactgaacaggattgtgcccttattggagaaacatgctgtgatattgccacatgtagatttaaagccggttcaaactgtgctgaaggaccatgctgcgaaaactgtctatttatgtcaaaagaaagaatgtgtaggccttcctttgaagaatgcgacctccctgaatattgcaatggatcatctgcatcatgcccagaaaaccactatgttcagactgggcatccgtgtggactgaatcaatggatctgtatagatggagtttgtatgagtggggataaacaatgtacagacacatttggcaaagaagtagagtttggcccttcagaatgttattctcaccttaattcaaagactgatgtatctggaaactgtggtataagtgattcaggatacacacagtgtgaagctgacaatctgcagtgcggaaaattaatatgtaaatatgtaggtaaatttttattacaaattccaagagccactattatttatgccaacataagtggacatctctgcattgctgtggaatttgccagtgatcatgcagacagccaaaagatgtggataaaagatggaacttcttgtggttcaaataaggtttgcaggaatcaaagatgtgtgagttcttcatacttgggttatgattgtactactgacaaatgcaatgatagaggtgtatgcaataacaaaaagcactgtcactgtagtgcttcatatttacctccagattgctcagttcaatcagatctatggcctggtgggagtattgacagtggcaattttccacctgtagctataccagccagactccctgaaaggcgctacattgagaacatttaccattccaaaccaatgagatggccatttttcttattcattcctttctttattattttctgtgtactgattgctataatggtgaaagttaatttccaaaggaaaaaatggagaactgaggactattcaagcgatgagcaacctgaaagtgagagtgaacctaaagggtagtctggacaacagagatgccatgatatcacttcttctagagtaattatctgtgatggatggacacaaaaaaatggaaagaaaagaatgtacattacctggtttcctgggattcaaacctgcatattgtgattttaatttgaccagaaaatatgatatatatgtataatttcacagataatttacttatttaaaaatgcatgataatgagttttacattacaaatttctgtttttttaaagttatcttacgctatttctgttggttagtagacactaattctgtcagtaggggcatggtataaggaaatatcataatgtaatgaggtggtactatgattaaaagccactgttacatttcaaaaaaaaaaaaaaa

SEQ ID NO: 116 - DNA, 492 bp, Homo sapiens
  misc_feature: Incyte ID No: 065582.1
aagaaatagaggaacaagttaactcatataaggcagaagcaataaactaaatgcggaaagttggacattctttagggctggttttgatgattaaagaagaaaaaaaatggagagtaaaatagatgtagaagacataacaaccaaaattaatacttgtgcttatttaaatgctgaattaaacaaatatggtataagaagaatattttgtttgattcaattggaaactttcagatatgaagcagatattaaatactattcaaataatactaagtgattaaggtcaaaattgttaggttaattccatattgttatgtaaaattttaatatgattttcatttaggacaacatactggtttcagtggagaggtggtatgatatctggaatttgctttaaaatcctgcagcaaaaattaattaaaatatataaataagtaaatacaataaaaacaagtggggtgattagaaaagattgaaagcatgttcacaatgatt

SEQ ID NO: 117 - DNA, 6433 bp, Homo sapiens
  misc_feature: Incyte ID No: 1188409.1
cccagcgctggcggcgtgggcccgggactgggcaatgggtggcctcccaggtcgccgccttcccgcggggccccgcccccggcccgccccaaagcgggctataagttagcgccgctctccgcctcggcagtgccagccgccagtggtcgcacttggagggtctcgccgccagtggaaggagccaccgcccccgcccgaccatggccgaggagctggtcttagagaggtgtgatctggagctggagaccaatggccgagaccaccacacggccgacctgtgccgggagaagctggtggtgcgacggggccagcccttctggctgaccctgcactttgagggccgcaactacgaggccagtgtagacagtctcaccttcagtgtcgtgaccggcccagcccctagccaggaggccgggaccaaggcccgttttccactaagagatgctgtggaggagggtgactggacagccaccgtggtggaccagcaagactgcaccctctcgctgcagctcaccaccccggccaacgcccccatcggcctgtatcgcctcagcctggaggcctccactggctaccagggatccagctttgtgctgggccacttcattttgctcttcaacgcctggtgcccagcggatgctgtgtacctggactcggaagaggagcggcaggagtatgtcctcacccagcagggctttatctaccagggctcggccaagttcatcaagaacataccttggaattttgggcagtttgaagatgggatcctagacatctgcctgatccttctagatgtcaaccccaagttcctgaagaacgccggccgtgactgctcccgccgcagcagccccgtctacgtgggccgggtggtgagtggcatggtcaactgcaacgatgaccagggtgtgctgctgggacgctgggacaacaactacggggacggcgtcagccccatgtcctggatcggcagcgtggacatcctgcggcgctggaagaaccacggctgccagcgcgtcaagtatggccagtgctgggtcttcgccgccgtggcctgcacagtgctgaggtgcctgggcatccctacccgcgtcgtgaccaactacaactcggcccatgaccagaacagcaaccttctcatcgagtacttccgcaatgagtttggggagatccagggtgacaagagcgagatgatctggaacttccactgctgggtggagtcgtggatgaccaggccggacctgcagccggggtacgagggctggcaggccctggacccaacgccccaggagaagagcgaagggacgtactgctgtggcccagttccagttcgtgccatcaaggagggcgacctgagcaccaagtacgatgcgccctttgtctttgcggaggtcaatgccgacgtggtagactggatccagcaggacgatgggtctgtgcacaaatccatcaaccgttccctgatcgttgggctgaagatcagcactaagagcgtgggccgagacgagcgggaggatatcacccacacctacaaatacccagaggggtcctcagaggagagggaggccttcacaagggcgaaccacctgaacaaactggccgagaaggaggagacagggatggccatgcggatccgtgtgggccagagcatgaacatgggcagtgactttgacgtctttgcccacatcaccaacaacaccgctgaggagtacgtctgccgcctcctgctctgtgcccgcaccgtcagctacaatgggatcttggggcccgagtgtggcaccaagtacctgctcaacctcaacctggagcctttctctgagaagagcgttcctctttgcatcctctatgagaaataccgtgactgccttacggagtccaacctcatcaaggtgcgggccctcctcgtggagccagttatcaacagctacctgctggctgagagggacctctacctggagaatccagaaatcaagatccggatccttggggagcccaagcagaaacgcaagctggtggctgaggtgtccctgcagaacccgctccctgtggccctggaaggctgcaccttcactgtggagggggccggcctgactgaggagcagaagacggtggagatcccagaccccgtggaggcaggggaggaagttaaggtgagaatggacctgctgccgctccacatgggcctccacaagctggtggtgaacttcgagagcgacaagctgaaggctgtgaagggcttccggaatgtcatcattggccccgcctaagggacccctgctcccagcctgctgagagcccccaccttgatcccaatccttatcccaagctagtgagcaaaatatgccccttcttgggccccagaccccagggcagggtgggcagcctatgggggctctcggaaatggaatgtgcccctggcccatctcagcctcctgagcctgtgggtccccactcaccccctttgctgtgaggaatgctctgtgccagaaacagtgggagccctgaccttggctgactggggctggggtgagagaggaaagacctacattccctctcctgcccagatgccctttggaaagccattgaccacccaccatattgtttgatctacttcatagctccttggagcaggcaaaaaagggacagcatgccccttggctggatcagggaatccagctccctagactgcatcccgtacctcttcccatgactgcacccagctccaggggcccttgggacagccagagctgggtggggacagtgataggcccaaggtcccctccacatcccagcagcccaagcttaatagccctccccctcaacctcaccattgtgaagcacctactatgtgctgggtgcctcccacacttgctggggctcacggggcctccaacccatttaatcaccatgggaaactgttgtgggcgctgcttccaggataaggagactgaggcttagagagaggaggcagccccctccacaccagtggcctcgtggttattagcaaggctgggtaatgtgaaggcccaagagcagagtctgggcctctgactctgagtccactgctccatttataaccccagcctgacctgagactgtcggagaggctgtctggggcctttatcaaaaaaagactcagccaagacaaggaggtagagaggggactgggggactgggagtcagagccctggctgggttcaggtcccacgtctggccaggcactgccttctcctctctgggcctttgtttccttgttggtcagaggagtgattgaaccagctcatctccaaggatcctctccactccatgtttgcaatgcttttatatggcccagccttgtaaataaccacaaggtccactccctgctccacgaagccttaagccataggcccaggatatttctgagagtgaaaccatgactgtgaccaccttctgtccccagccctgtcctggttccttcctatgcccaggtaccacccttcagaccccagttctaggggagaagagccctggacacccctgctctacccatgagcctgcccgctgcaatgcctagacttcccaacagccttagctgccagtgctggtcactaaccaacaaggttggcaccccagctaccccttctttgcagggctaaggcccccaaacatagcccctgccccggaggaagcttggggaacccatgagttgtcagctttgactttatctcctgctctttctacatgactgggcctcccttgggctggaagaattggggattctctattggaggtgagatcacagcctccagggccccccaaatcccagggaaggacttggagagaatcatgctgttgcatttagaactttctgctttgcacaggaaagagtcacacaattaatcaacatgtatattttctctatacatagagctctatttctctacggttttataaaagccttgggttccaaccaggcagtagatgtgcttctgaaccgcaaggagcaaacactgaaataaaataaacttgtcctcgtcatattcatccacgtccaccttccggaagaggcctttgccgctggtcgggattgggatgtcgaagaacacagtgtcgtcggcccgcttccggaaggaaagacagccaccgacctcagaagcagcccctccttgcgctggaccagaaggataaggggagacctagccaccagtgggccagtgggggtgaggggcttctaggaaaaccggtgtctgggactctggcggttgatggtgtcatctgcgcgggatgctgggcctccacctcccaacctcctccgggacagtacaggtttgggggcaaggcctgagcagggcaggctggggagaccgctgtccctggggttttgtgggcaggggctgggtgcaggccggacagacagaaagcagtcccagctcaaggcagaaggccagagggtgtggagtgaaagggacaggcgaagccaggttcggagagatggagggaacaggccaccaagctcagaagcgagaaaggtctgaggaagcacaagacacacacacacacacacacacacacacacacacacacacagaaagagagagagagagagagagagagagagaggaaggaaggacggggaaagagagaacagaagggaggactggtcgaagggccagtggagcaggggtcttggagggacaggccatgaacttgcaagggggctgaggggagccgcagagtcggggagggttgaaaggctggaaatgcatgaggaggaggaacagaacatgtgtgtctggacaggtgcggcagccctggcagagcccactgtccccattcttatggaccgcctcctggctgctgacccagggactgttctcctaggactggagccttggacacttgggtttgggagtgaacgagaaaaaagcttcatggggtgcctctgggtggctgtggtgggagagcaggggcagctctgaggccaagggaacatgtgatgggggccgggccttgcgcccacctgcacccttgggagccagggagaggcggtgatggggcatcgagctggggtcagggacctgaggtggggggctgggttggacgcagctgggccctggcttagcttcctggctctgcctccccatcaggatgtctggctgtgttccccagagacccccactgaggccccgcggtggctgcagctgcctctactttttgtagttgccaaactggatggccaggcggtcagtgacgcagcggaaagtggccggctgcacctcccagtagggcacggggttgttgaagaggctgatgccgttgtagtaggcccgcttcaccccgaagcccatgggacagaagtcgttgacacccactttggtgatgttgttggagtgcagatagaccacctggaggagcttgaggtctgggagccctgagggcaccctggccaacttgttgttgtccaagtggagctcccggagggtgggcaggaagctcaggctcccgttctcgatcatcctgatctggttgtggcctaggcccagcctgtacagcttggagtagcgaagcaggtcctccagttcgatggcctggattttgttgtggtctaggtggagttcattcagggtctcagggaggtctttggggatgccagtcagcttggcctctgagatgcgcaggtagttgagcttcaggccatcgaaggctccaggttcaaagccactgttctccagtgggttcccgcccatctcgatgcagttcatgttccggagcccgctgaacactcccttgggcaccttgcggatgcggttgtcgtggatgcggagctccaccagggagctgggtaggttgggcgggatctccaccaggtggttcttggagatgtagagcttctgcagcttccgcagtgggctgaaggccttctcatggatcttggagatcttgttgttcaccaggacgagggcgtagaggtgctggagacccttgaagtcatccttgcggagctcggagatgtcgttgttctgcaggtccagcagcgtggtgtcaggggagatctctttgggcacagacttcagacccaggtcggagcactgaaccacccgcaggtggcagtggcagccgaaaggacacatggcgctgtaggtgggtgtgacagagtccgggtccaggacgcctgaggtgtcagcgcccgaagcttcctcatcgttcatcatgaatggcccatcgtccagggtgaagtcccagaagcctctctgctcaaagggcagggcctggctcagggccagcagagacacgaggcgccacaggggccacatggcaggatggacctggagaggggaggcgccaggcgcaggctgactagttggagggctggggtggtgggccgtccgcacgtctatctgtccggtgtgtccggcggaccgaaagcagctactcactcctgggcagtttgtgg

SEQ ID NO: 118 - DNA, 2362 bp, Homo sapiens
  misc_feature: Incyte ID No: 1188409.15
gcctcccgcccgccgcctctgtctccctctctccacaaactgcccaggagtgagtagctgctttcggtccgccggacacaccggacagatagacgtgcggacggcccaccaccccagcccgccaactagtcagcctgcgcctggcgcctcccctctccaggtccatccgccatgtggcccctgtggcgcctcgtgtctctgctggccctgagccaggccctgccctttgagcagagaggcttctgggacttcaccctggacgatgggccattcatgatgaacgatgaggaagcttcgggcgctgacacctcgggcgtcctggacccggactctgtcacacccacctacagcgccatgtgtcctttcggctgccactgccacctgcgggtggttcagtgctccgacctgggtctgaagtctgtgcccaaagagatctcccctgacaccacgctgctggacctgcagaacaacgacatctccgagctccgcaaggatgacttcaagggtctccagcacctctacgccctcgtcctggtgaacaacaagatctccaagatccatgagaaggccttcagcccactgcggaagctgcagaagctctacatctccaagaaccacctggtggagatcccgcccaacctacccagctccctggtggagctccgcatccacgacaaccgcatccgcaaggtgcccaagggagtgttcagtgggctccggaacatgaactgcatcgagatgggcgggaacccactggagaacagtggctttgaacctggagccttcgatggcctgaagctcaactacctgcgcatctcagaggccaagctgactggcatccccaaagacctccctgagaccctgaatgaactccacctagaccacaacaaaatccaggccatcgaactggaggacctgcttcgctactccaagctgtacaggctgggcctaggccacaaccagatcaggatgatcgagaacgggagcctgagcttcctgcccaccctccgggagctccacttggacaacaacaagttggccagggtgccctcagggctcccagacctcaagctcctccaggtggtctatctgcactccaacaacatcaccaaagtgggtgtcaacgacttctgtcccatgggcttcggggtgaagcgggcctactacaacggcatcagcctcttcaacaaccccgtgccctactgggaggtgcagccggccactttccgctgcgtcactgaccgcctggccatccagtttggcaactacaaaaagtagaggcagctgcagccaccgcggggcctcagtgggggtctctggggaacacagccagacatcctgatggggaggcagagccaggaagctaagccagggcccagctgcgtccaacccagccccccacctcgggtccctgaccccagctcgatgccccatcaccgcctctccctggctcccaagggtgcaggtgggcgcaaggcccggcccccatcacatgttcccttggcctcagagctgcccctgctctcccaccacagccacccagaggcaccccatgaagcttttttctcgttcactcccaaacccaagtgtccaaggctccagtcctaggagaacagtccctgggtcagcagccaggaggcggtccataagaatggggacagtgggctctgccagggctgccgcacctgtccagacacacatgttctgttcctcctcctcatgcatttccagcctttcaaccctccccgactctgcggctcccctcagcccccttgcaagttcatggcctgtccctcccagacccctgctccactggcccttcgaccagtcctcccttctgttctctctttccccgtccttcctctctctctctctctctctctctctctctttctgtgtgtgtgtgtgtgtgtgtgtgtgtgtgtgtgtgtgtcttgtgcttcctcagacctttctcgcttctgagcttggtggcctgttccctccatctctccgaacctggcttcgcctgtccctttcactccacaccctctggccttctgccttgagctgggactgctttctgtctgtccggcctgcacccagcccctgcccacaaaaccccagggacagcggtctccccagcctgccctgctcaggccttgcccccaaacctgtactgtcccggaggaggttgggaggtggaggcccagcatcccgcgcagatgacaccggttttcctagaagcccctcacccccactggcccactggtggctaggtctccccttatccttctggtccagcgcaaggaggggctgcttctgaggtcggtggctgtctttccattaaagaaacaccgtgcaacgtgtttttttctatttt

SEQ ID NO: 119 - DNA, 491 bp, Homo sapiens
  misc_feature: Incyte ID No: 1102234.75
ctgatctggtaaagccctcatcctgtcctgaccctaccatgggcaccagtctcctatgctgggtggtcctgggtttcctagggacagatcacacaggtgctggagtctcccagtctcccaggtacaaagtcacaaagaggggacaggatgtagctctcaggtgtgatccaatttcgggtcatgtatccctttattggtaccgacaggccctggggcagggcccagagtttctgacttacttcaattatgaagcccaacaagacaaatcagggctgcccaatgatcggttctctgcagagaggcctgagggatccatctccactctgacgatccagcgcacagagcagcgggactcggccatgtatcgctgtgccagcagcttagatgtaggatttgcaaacaccatatattttggagagggaagttggctcactgttgtagaggacctgaacaaggtgttcccacccgaggtcgctgtgtttgagccatca

SEQ ID NO: 120 - DNA, 4925 bp, Homo sapiens
  misc_feature: Incyte ID No: 403534.6
  unsure 2652-2681: a, t, c, g, or other
catcagcaagaagacaaaccgaggacagtcttgaaatatcgaaatttcctctttgggatttgccagcgccaagactgtcggaataaaggacgctgactattgtattattgttattttattaattagtcagtggaaagattacagatgaggaaaggggacgcctgtcacccttcctgtgctaagatttaaaaaaaaatgaggctggattgcgggaagctctaaaatgaagcaaaaggagtaagatttttaaagacagaaagccacaggagcccccacgtagcgcacttttatttgtattttttcagatttttttttgtttcgtggtggtgggggaggtgattgggtggctgactggctgcgggaagctacttcctttccttttggagatgattgtgctattattgtttgccttgctctggatggtggaaggagtcttttcccagcttcactacacggtacaggaggagcaggaacatggcactttcgtggggaatatcgctgaagatctgggtctggacattacaaaactttcggctcgcgggtttcagacggtgcccaactcaaggaccccttacttagacctcaacctggagacaggggtgctgtacgtgaacgagaaaatagaccgcgaacaaatctgcaaacagagcccctcctgtgtcctgcacctggaggtctttctggagaaccccctggagctgttccaggtggagatcgaggtgctggacattaatgacaaccccccctctttcccggagccagacctgacggtggaaatctctgagagcgccacgccaggcactcgcttccccttggagagcgcattcgacccagacgtgggcaccaactccttgcgcgactacgagatcacccccaacagctacttctccctggacgtgcagacccagggggatggcaaccgattcgctgagctggtgctggagaagccactggaccgagagcagcaagcggtgcaccgctacgtgctgaccgcggtggacggaggaggtgggggaggagtaggagaaggagggggaggtggcgggggagcaggcctgcccccccagcagcagcgcaccggcacggccctactcaccatccgagtgctggactccaatgacaatgtgcccgctttcgaccaacccgtctacactgtgtccctaccagagaactctcccccaggcactctcgtgatccagctcaacgccaccgacccggacgagggccagaacggtgaggtcgtgtactccttcagcagccacatttcgccccgggcgcgggagcttttcggactctcgccgcgcactggcagactggaggtaagcggcgagttggactatgaagagagcccagtgtaccaagtgtacgtgcaagccaaggacctgggccccaacgccgtgcctgcgcactgcaaggtgctagtgcgagtactggatgctaatgacaacgcgccagagatcagcttcagcaccgtgaaggaagcggtgagtgagggcgcggcgcccggcactgtggtggcccttttcagcgtgactgaccgcgactcagaggagaatgggcaggtgcagtgcgagctactgggagacgtgcctttccgcctcaagtcttcctttaagaattactacaccatcgttaccgaagcccccctggaccgagaggcgggggactcctacaccctgactgtagtggctcgggaccggggcgagcctgcgctctccaccagtaagtcgatccaggtacaagtgtcggatgtgaacgacaacgcgccgcgtttcagccagccggtctacgacgtgtatgtgactgaaaacaacgtgcctggcgcctacatctacgcggtgagcgccaccgaccgggatgagggcgccaacgcccagcttgcctactctatcctcgagtgccagatccagggcatgagcgtcttcacctacgtttctatcaactctgagaacggctacttgtacgccctgcgctccttcgactatgagcagctgaaggacttcagttttcaggtggaagcccgggacgctggcagcccccaggcgctggctggtaacgccactgtcaacatcctcatagtggatcaaaatgacaacgcccctgccatcgtggcgcctctaccagggcgcaacgggactccagcgcgtgaggtgctgccccgctcggcggagccgggttacctgctcacccgcgtggccgccgtggacgcggacgacggcgagaacgcccggctcacttacagcatcgtgcgtggcaacgaaatgaacctctttcgcatggactggcgcaccggggagctgcgcacagcacgccgagtcccggccaagcgcgacccccagcggccttatgagctggtgatcgaggtgcgcgaccatgggcagccgcccctttcctccaccgccaccctggtggttcagctggtggatggcgccgtggagccccagggcgggggcgggagcggaggcggagggtcaggagagcaccagcgccccagtcgctctggcggcggggaaacctcgctagacctcaccctcatcctcatcatcgcgttgggctcggtgtccttcatcttcctgctggccatgatcgtgctggccgtgcgttgccaaaaagagaagaagctcaacatctatacttgtctggccagcgatnnnnnnnnnnnnnnnnnnnnnnnnnnnnnnggaggttcgacctgctgtggccgccaagcccgggcgcgcaagaagaaactcagcaagtcagacatcatgctggtgcagagctccaatgtacccagtaacccggcccaggtgccgatagaggagtccgggggctttggctcccaccaccacaaccagaattactgctatcaggtatgcctgacccctgagtccgccaagaccgacctgatgtttcttaagccctgcagcccttcgcggagtacggacactgagcacaacccctgcggggccatcgtcaccggttacaccgaccagcagcctgatatcatctccaacggaagcattttgtccaacgagactaaacaccagcgagcagagctcagctatctagttgacagacctcgccgagttaacagttctgcattccaggaagccgacatagtaagctctaaggacagtggtcatggagacagtgaacagggagatagtgatcatgatgccaccaaccgtgcccagtcagctggtatggatctcttctccaattgcactgaggaatgtaaagctctgggccactcagatcggtgctggatgccttcttttgtcccttctgatggacgccaggctgctgattatcgcagcaatctgcatgttcctggcatggactctgttccagacactgaggtgtttgaaactccagaagcccagcctggggcagagcggtccttttccacctttggcaaagagaaggcccttcacagcactctggagaggaaggagctggatggactgctgactaatacgcgagcgccttacaaaccaccatatttgacacggaaaaggatatgctagtcaattctacaggacttacctgaagcagcatgatttgcacaaagtcgaccaacaaaagcatcaacttttcaacttcattatcttggccatccagttagtcatgtgtaactgagtattagatttcggatggagtcatcatggccaattataggacctaattgctctcagcaggcctgagaaatgagttgaaatgtgcagaactgtagaaactttagaggcaacagattttgcctccccgatcagtgtgtgcctgtttacagcactatctatctttctctctccaaatgtcactgagccctttagatgtttatattcaccacgagaagccagtcataaagataaaggaaatttgtgcattataaatgcaatatcactgttttaaacttgactgttttatattatttttgtgtgatcaagtgttccgcaagctattccaactttacaagagaaattgtgattatgttcttttcacctgtgggttataaaaaatgttgtattctgaagacccacaaaatatcaaagacattctgtagtttatacaccgtgttgcaaagtgtttactgtactatttcaaagcttctaaataaatataaaatatatatattatattatataattttcctaaaatgtggtacaactcagttggtttttaaatggatgcatacagtccacatcatacaataaaataaaaggtaattcagggtcccaaagacaaacttactaagaaaaaatcattaatagttttctcccaatttccatatcttactcaaccgtgtttttccttgtttaaaagaaaatgatgctctaagctacaaaattttgtcaaaaactcatattgaattttcaatgccaaagatgtagctattgatgttatcagacagagcactgactatgtactatcaaactatctaacaatctgcataagtctgattctatttctatgactttgaatttagaatcacttaaagcttttataaagaatcgataaattcacctgtatttgttgttagaaaaaaactgggtgtctgtacattttgtggtgtaaaatatgtaattgaagattactattttaagaagtcatcagtcatatcactcacacagaattttattttacatagttttgtgacttaattacacatgaatataaaatctataattctatatgaatatatagagatatagaaacatctgaactggtaaagaataactataaaatatgaaagctctaaatttaaaataaatttagagatagaatcatggtacattattgtttcagtattccatgtaaaaattttatagcttaaatgtagtcagtgtttgattaatgaaaaaattcttcatgagtcagccttcaaaagttaagcttgccttttacttttatgtcaacaatattaattattaaatttagtaagacgc

SEQ ID NO: 121 - DNA, 3505 bp, Homo sapiens
  misc_feature: Incyte ID No: 238349.4
  unsure 2790-2955: a, t, c, g, or other
acgagatgaatgaggtggaaacggctcccattcctgaagaaaaccatgtttggctccaaccgagggtgatgagacccaccaagcccaagaaaacctctgcggtcaactacatgacccaagtcgtcagatgtgacaccaagatgaaggacaggtgcaaagggtccacgtgtaacaggtaccagtgcccagcaggctgcctgaaccacaaggcgaagatctttggaagtctgttctatgaaagctcgtctagcatatgccgcgccgccatccactacgggatcctggatgacaagggaggcctggtggatatcaccaggaacgggaaggtccccttcttcgtgaagtctgagagacacggcgtgcagtccctcagcaaatacaaaccttccagctcattcatggtgtcaaaagtgaaagtgcaggatttggactgctacacgaccgttgctcagctgtgcccgtttgaaaagccagcaactcactgcccaagaatccattgtccggcacactgcaaagacgaaccttcctactgggctccggtgtttggaaccaacatctatgcagatacctcaagcatctgcaagacagctgtgcacgcgggagtcatcagcaacgagagtgggggtgacgtggacgtgatgcccgtggataaaaagaagacctacgtgggctcgctcaggaatggagttcagtctgaaagcctggggactcctcgggatggaaaggccttccggatctttgctgtcaggcagtgaatttccagcaccaggggagaaggggcgtcttcaggagggcttcggggttttgcttttatttttattttgtcattgcggggtatatggagagtcaggaaacttcctttgactgatgttcagtgtccatcactttgtggcctgtgggtgaggtgacatctcatcccctcactgaagcaacagcatcccaaggtgctcagccggactccctggtgcctgatcctgctggggcccgggggtctccatctggacgtcctctctcctttagagatctgagctgtctcttaaaggggacagttgcccaaaatgttccttgctatgtgttcttctgttggtggaggaagttgatttcaacctccctgccaaaagaacaaaccatttgaagctcacaattgtgaagcattcacggcgtcggaagaggccttttgagcaagcgccaatgagtttcaggaatgaagtagaaggtagttatttaaaaataaaaaacacagtccgtccctaccaatagaggaaaatggttttaatgtttgctggtcagacagacaaatgggctagagtaagagggctgcgggtatgagagaccccggctccgccctggcacgtgtccttgctggcggcccgccacaggcccccttcaatggccgcattcaggatggctctatacacagcagtgctggtttatgtagagttcagcagtcacttcagagatgtatcttgtctttgtcaggcccttcatcttcatggcccacctgttttctgccgtgacctttggtcccattgaggactaaggatcgggaccctttctttaccccctacccgttgtggctcccaccctgcctcggactggtttacgtgtcctggttcacacccaggacttttctttgcaagcgaacctgtttgaagcccaagtcttaactcctggtctcgtaaggttccactgagacgagatgtctgagaacaaccaaagaaggcctgctctttgctgcttttaaaaaatgacaattaaatgtgcagattccccacgcacccgatgacctattttttcagccgtgggaggaatggagtctttggtacattcctcaccgaggttagcagctcagtttgtggttatgaaaccgtctgtggcctcatgacagcgagagatgggaatacactagaaggatctcttttcctgttttcgtgaaacgactcttgccaaacgttcccgaggcgccaaggagtgtagtacaccctggctgccatcactctataaaagtgcttcatgagcccagaccaaaagcccacagtgaaatgaagtacccttttgtaaatagcatttttttgcagaaggtgaaaattccactctctaccaccgggccagccaatagatcactttggtgaatgctagtttcaaatttgattcaaaatatttcttaggtgaaagaactagcagaaagtcaaaaactaagatactgtagactggacaagaaattctacctgggcacctaggtgatgccttctttctttgattgcctttctaataaatgcagaatctgaaggtaaataggtttaaaacaaaacaaaaacccacccctttaaggagttggtaaaaagcagttcaactcttagcttgactgagctaaaattcacaggactacgtgctttgtgcattgtagtctagtcgtaattcataggtactgactcctcagccccaaatgtcggagaggaagaattcggtcagcctgtcaggtcgtgagtccagttaccaccaaacatctgggaaacttctgggtgctgggtgctctgctgctggacttttgtggctgtgtctgtgtctgcaagataaattagatcgccctgtggggtttgcagaattagtgaagggtccaggacgatcccagtgggctcgcttccaaagcatcccactcaagggagacttgaaacttccagtgtgagttgaccccatcatttaaaaataaagtccccgggttccttaatgcctccttcactgggccttcctagcaggatagaaagtccttgcccagagcaggacctggcnnnnnnnnnnnnnnnnnnnnnnnnnnnnnnnnnnnnnnnnnnnnnnnnnnnnnnnnnnnnnnnnnnnnnnnnnnnnnnnnnnnnnnnnnnnnnnnnnnnnnnnnnnnnnnnnnnnnnnnnnnnnnnnnnnnnnnnnnnnnnnnnnnnnnnnnnnnnnnnnnnnnnncatgcccggccatggacctggctgtctttatcatccccacaaacattttgaaactggaatatttgtcttcagaaaatggaaacaagactataaatgataagccctgtccctagcaccacctctcctgtgtgtggaatagaggcccctcgtgctaccaacacttaccctgtgtttaaaaagatcttgtaccaagccaacggcgttcctggctctcctgcccacaggatgaacattttcggcttccttaggagttttgccctaccgtattccaaagcgtgtgctggtttctcatattgtctgtaggctcactcagcccgcagtttatgtgtgtgcttttttctatgaaaaatgatgtattttgctacttcctgtgtacaaagttttattgtaaatgttttttgtgctttgcatgaacaggggccacgttgttgcaattgtttcagtagaactggtttgatttctaaaatgttcctgtaacatatcttttatgaacaaatctgaacaatttgtgaaataaaacattgaaaaccatcaaaaaataaattaaaat

SEQ ID NO: 122 - DNA, 484 bp, Homo sapiens
  misc_feature: Incyte ID No: 017058.1
atcaatagctacaaacctagtggaagaatcatctacagaagaagatttgtctgaaactgataatacagagactgtacctaagatcactgagccattttctggaactacctctgtattagataccccagactataaggaagacacctccacaactgaaacggatatctttgaactactgaaagaagaacccgatgagttcatgatttaaaagcaacaaaagggataccatgtagaattgtgcaatagtctagccagctagccttaacatctaagaaatttttccaacaagcaaaaacctttagaaatgaaagaatgtgggcatttaaggtcttaaacactgaatatcacactcttcttatgactcttgttagcgattcaaggacataaatcttcattcttttctggcacagactacttaaatgggtctgttttcactttgctcatttttcttcaataaatctttttggcaagcaactgaaaaaaa

SEQ ID NO: 123 - DNA, 13559 bp, Homo sapiens
  misc_feature: Incyte ID No: 190188cB1
ggccggcgagcgggcggctgcgggcggcgcggagcgggcggcgcggagcgagcgagcgagagagcggcgcgggccgggccatggggtggcgggcgccgggcgcgctgctgctggcgctgctgctgcacgggcggctgctggcggtgacccatgggctgagggcatacgatggcttgtctctgcctgaggacatagagaccgtcacagcaagccaaatgcgctggacacattcgtacctttctgatgatgagtacatgctggctgacagcatctcaggagacgacctgggcagtggggacctgggcagcggggacttccagatggtttatttccgagccctggtgaatttcactcgctccatcgagtacagccctcagctggaggatgcaggctccagagagtttcgagaggtgtccgaggctgtggtagacacgctggagtcggagtacttgaaaattcccggagaccaggttgtcagtgtggtgttcatcaaggagctggatggctgggtttttgtggagctggatgtgggctcggaagggaatgcggatggtgctcagattcaggagatgctgctcagggtcatctccagcggctctgtggcctcctacgtcacctctccccagggattccagttccgacgcctgggcacagtgccccagttcccaagagcctgcacggaggccgagtttgcctgccacagctacaatgagtgtgtggccctggagtatcgctgtgaccggcggcccgactgcagggacatgtctgatgagctcaattgtgaggagccagtcctgggtatcagccccacattctctctccttgtggagacgacatctttaccgccccggccagagacaaccatcatgcgacagccaccagtcacccacgctcctcagcccctgcttcccggttccgtcaggcccctgccctgtgggccccaggaggccgcatgccgcaatgggcactgcatccccagagactacctctgcgacggacaggaggactgcgaggacggcagcgatgagctagactgtggccccccgccaccctgtgagcccaacgagttcccctgcgggaatggacattgtgccctcaagctgtggcgctgcgatggtgactttgactgtgaggaccgaactgatgaagccaactgccccaccaagcgtcctgaggaagtgtgcgggcccacacagttccgatgcgtctctaccaacatgtgcatcccagccagcttccactgtgacgaggagagcgactgtcctgaccggagcgacgagtttggctgcatgcccccccaggtggtgacacctccccgggagtccatccaggcttcccggggccagacagtgaccttcacctgcgtggccattggcgtccccacccccatcatcaattggaggctcaactggggccacatcccctctcatcccagggtgacagtgaccagcgagggtggccgtggcacactgatcatccgtgatgtgaaggagtcagaccagggtgcctacacctgtgaggccatgaacgcccggggcatggtgtttggcattcctgacggtgtccttgagctcgtcccacaacgagcaggcccctgccctgacggccacttctacctggagcacagcgccgcctgcctgccctgcttctgctttggcatcaccagcgtgtgccagagcacccgccgcttccgggaccagatcaggctgcgctttgaccaacccgatgacttcaagggtgtgaatgtgacaatgcctgcgcagcccggcacgccacccctctcctccacgcagctgcagatcgacccatccctgcacgagttccagctagtcgacctgtcccgccgcttcctcgtccacgactccttctgggctctgcctgaacagttcctgggcaacaaggtggactcctatggcggctccctgcgttacaacgtgcgctacgagttggcccgtggcatgctggagccagtgcagcggccggacgtggtcctcgtgggtgccgggtaccgcctcctctcccgaggccacacacccacccaacctggtgctctgaaccagcgccaggtccagttctctgaggagcactgggtccatgagtctggccggccggtgcagcgcgcggagctgctgcaggtgctgcagagcctggaggccgtgctcatccagaccgtgtacaacaccaagatggctagcgtgggacttagcgacatcgccatggataccaccgtcacccatgccaccagccatggccgtgcccacagtgtggaggagtgcagatgccccattggctattctggcttgtcctgcgagagctgtgatgcccacttcactcgggtgcctggtgggccctacctgggcacctgctctggttgcagttgcaatggccatgccagctcctgtgaccctgtgtatggccactgcctgaattgccagcacaacacggaggggccacagtgcaacaagtgcaaggctggcttctttggggacgccatgaaggccacggccacttcctgccggccctgcccttgcccatacatcgatgcctcccgcagattctcagacacttgcttcctggacacggatggccaagccacatgtgacgcctgtgccccaggctacactggccgccgctgtgagagctgtgcccccggatacgagggcaaccccatccagcccggcgggaagtgcaggcccgtcaaccaggagattgtgcgctgtgacgagcgtggcagcatggggacctccggggaggcctgccgctgtaagaacaatgtggtggggcgcttgtgcaatgaatgtgctgacggctctttccacctgagtacccgaaaccccgatggctgcctcaagtgcttctgcatgggtgtcagtcgccactgcaccagctcttcatggagccgtgcccagttgcatggggcctctgaggagcctggtcacttcagcctgaccaacgccgcaagcacccacaccaccaacgagggcatcttctcccccacgcccggggaactgggattctcctccttccacagactcttatctggaccctacttctggagcctcccttcacgcttcctgggggacaaggtgacctcctatggaggagagctgcgcttcacagtgacccagaggtcccagccgggctccacacccctgcacgggcagccgttggtggtgctgcaaggtaacaacatcatcctagagcaccatgtggcccaggagcccagccccggccagcccagcaccttcattgtgcctttccgggagcaagcatggcagcggcccgatgggcagccagccacacgggagcacctgctgatggcactggcaggcatcgacaccctcctgatccgagcatcctacgcccagcagcccgctgagagcagggtctctggcatcagcatggacgtggctgtgcccgaggaaaccggccaggaccccgcgctggaagtggaacagtgctcctgcccacccgggtaccgtgggccgtcctgccaggactgtgacacaggctacacacgcacgcccagtggcctctacctgggtacctgtgaacgctgcagctgccatggccactcagaggcctgcgagccagaaacaggtgcctgccagggctgccagcatcacacggagggccctcggtgtgagcagtgccagccaggatactacggggacgcccagcgggggacaccacaggactgccagctgtgcccctgctacggagaccctgctgccggccaggctgcccacacttgttttctggacacagacggccaccccacctgtgatgcgtgctccccaggccacagtgggcgtcactgtgagaggtgcgcccctggctactatggcaaccccagccagggccagccatgccagagagacagccaggtgccagggcccataggctgcaactgtgacccccaaggcagcgtcagcagccagtgtgatgctgctggtcagtgccagtgcaaggcccaggtggaaggcctcacttgcagccactgccggccccaccacttccacctgagtgccagcaacccagacggctgcctgccctgcttctgtatgggcatcacccagcagtgcgccagctctgcctacacacgccacctgatctccacccactttgcccctggggacttccaaggctttgccctggtgaacccacagcgaaacagccgcctgacaggagaattcactgtggaacccgtgcccgagggtgcccagctctcttttggcaactttgcccaactcggccatgagtccttctactggcagctgccggagacataccagggagacaaggtggcggcctacggtgggaagttgcgatacaccctctcctacacagcaggcccacagggcagcccactctcggaccccgatgtgcagatcacgggcaacaacatcatgctagtggcctcccagccagcgctgcagggcccagagaggaggagctacgagatcatgttccgagaggaattctggcgccggcccgatgggcagccggccacacgcgagcacctcctgatggcactggccgacctggatgagctcctgatccgggccacgttctcctccgtgccgctggtggccagcatcagcgcagtcagcctggaggtcgcccagccggggccctcaaacagaccccgcgccctcgaggtggaggagtgccgctgcccgccaggctacatcggtctgtcctgccaggactgtgcccccggctacacgcgcaccgggagtgggctctacctcggccactgcgagctatgtgaatgcaatggccactcagacctgtgccacccagagactggggcctgctcgcaatgccagcacaacgccgcaggggagttctgcgagctttgtgcccctggctactacggagatgccacagccgggacgcctgaggactgccagccctgtgcctgcccactgaccaacccagagaacatgttttcccgcacctgtgagagcctgggagccggcgggtaccgctgcacggcctgcgaacccggctacactggccagtactgtgagcagtgtggcccaggttacgtgggtaaccccagtgtgcaagggggccagtgcctgccagagacaaaccaagccccactggtggtcgaggtccatcctgctcgaagcatagtgccccaaggtggctcccactccctgcggtgtcaggtcagtgggagcccaccccactacttctattggtcccgtgaggatgggcggcctgtgcccagcggcacccagcagcgacatcaaggctccgagctccacttccccagcgtccagccctcggatgctggggtctacatttgcacctgccgtaatctccaccaatccaataccagccgggcagagctgctggtcactgaggctccaagcaagcccatcacagtgactgtggaggagcagcggagccagagcgtgcgccccggagctgacgtcaccttcatctgcacagccaaaagcaagtccccagcctataccctggtgtggacccgcctgcacaacgggaaactgcccacccgagccatggatttcaatggcatcctgaccattcgcaacgtccagctgagtgatgcaggcacctacgtgtgcaccggctccaacatgtttgccatggaccagggcacagccactctacatgtgcaggcctcgggcaccttgtccgcccccgtggtctccatccatccgccacagctcacagtgcagcccgggcaactggcggagttccgctgcagcgccacagggagccccacgcccaccctcgagtggacagggggccccggcggccagctccctgcgaaggcacaaatccacggcggcatcctgcgcctgccagctgtcgagcccacggatcaggcccagtacttgtgccgagcccacagcagcgctgggcagcaggtggccagggctgtgctccacgtgcatgggggcggtgggcccagagtccaagtgagcccagagaggacccaggtccacgcaggccggaccgtcaggctgtactgcagggctgcaggcgtgcctagcgccaccatcacctggaggaaggaagggggcagcctcccaccacaggcccggtcagagcgcacagacatcgcgacactgctcatcccagccatcacgactgctgacgccggcttctacctctgcgtggccaccagccctgcaggcactgcccaggcccggatgcaagtggttgtcctttcagcctcagatgccagcccaccgggggtcaagattgagtcctcatcgccttctgtgacagaagggcaaacactcgacctcaactgtgtggtggcagggtcagcccatgcccaggtcacctggtacaggcgagggggtagcctgcctccccacacccaggtgcacggctcccgtctgcggctcccccaggtctcaccagctgattctggagaatatgtgtgccgtgtggagaatggatcgggccccaaggaggcctccattactgtgtctgtgctccacggcacccattctggccccagctacaccccagtgcccggcagcacccggcccatccgcatcgagccctcctcctcacacgtggcggaagggcagaccctggatctgaactgcgtggtgcccgggcaggcccacgcccaggtcacgtggcacaagcgtgggggcagcctccctgcccggcaccagacccacggctcgctgctgcggctgcaccaggtgaccccggccgactcaggcgagtatgtgtgccatgtggtgggcacctccggccccctagaggcctcagtcctggtcaccatcgaagcctctgtcatccctggacccatcccacctgtcaggatcgagtcttcatcctccacagtggccgagggccagaccctggatctgagctgcgtggtggcagggcaggcccacgcccaggtcacatggtacaagcgtgggggcagcctccctgcccggcaccaggttcgtggctcccgcctgtacatcttccaggcctcacctgccgatgcgggacagtacgtctgccgggccagcaacggcatggaggcctccatcacggtcacagtaactgggacccagggggccaacttagcctaccctgccggcagcacccagcccatccgcatcgagccctcctcctcgcaagtggcggaagggcagaccctggatctgaactgcgtggtgcccgggcagtcccatgcccaggtcacgtggcacaagcgtgggggcagcctccctgtccggcaccagacccacggctccctgctgagactctaccaagcgtcccccgccgactcgggcgagtacgtgtgccgagtgttgggcagctccgtgcctctagaggcctctgtcctggtcaccattgagcctgcgggctcagtgcctgcacttggggtcacccccacggtccggatcgagtcatcgtcttcgcaagtggccgaggggcagaccctggacctgaactgcctcgttgctggtcaggcccatgcccaggtcacgtggcacaagcgcgggggcagcctcccggcccggcaccaggtgcatggctcgaggctacgcctgctccaggtgaccccagctgattcaggggagtacgtgtgccgtgtggtcggcagctcaggtacccaggaagcctcagtccttgtcaccatccagcagcgccttagtggctcccactcccagggtgtggcgtaccccgtccgcatcgagtcctcctcagcctccctggccaatggacacaccctggacctcaactgcctggttgccagccaggctccccacaccatcacctggtataagcgtggaggcagcttacccagccggcaccagatcgtgggctcccggctgcggatccctcaggtgactccggcagactcgggcgagtacgtgtgtcacgtcagtaacggtgcaggctcccgggagacctcgctcatcgtcaccatccagggcagcggttcctcccacgtgcccagcgtctccccaccgatcaggatcgagtcgtcttcccccacggtggtggaagggcagaccttggatctgaactgcgtggtcgccaggcagccccaggctatcatcacatggtacaagcgtgggggcagccttccctcccgacaccagacccatggctcccacctgcggttgcaccaaatgtctgtggctgactcgggcgagtatgtgtgccgggccaacaacaacatcgatgccctggaggcctccatcgtcatctccgtctcccctagcgccggcagcccctccgcccctggcagctccatgcccatcagaattgagtcatcctcctcacacgtggccgaaggggagaccctggatctgaactgcgtggtccccgggcaggcccatgcccaggtcacttggcacaagcgtgggggcagcctccccagtcaccatcagacccgcggctcacggctgcggctgcaccatgtgtccccggccgactcgggtgaatacgtgtgccgggtgatgggcagctctggccccctggaggcctcagtcctggtcaccatcgaagcctctggctcaagtgctgtccacgtccccgccccaggtggagccccacccatccgcatcgagccctcctcctcccgagtggcagaagggcagaccctggatctgaagtgcgtggtgcccgggcaggcccacgcccaggtcacgtggcacaagcgtggaggaaacctccctgcccggcaccaggtccacggcccactgctgaggctgaaccaggtgtccccggctgactctggcgagtactcgtgccaagtgaccggaagctcaggcaccctggaggcatctgtcctggtcacaattgagccctccagcccaggacccattcctgctccaggactggcccagcccatctacatcgaggcctcctcttcacacgtgactgaagggcagactctggatctgaactgtgtggtgcccgggcaggcccatgcccaggtcacgtggtacaagcgcgggggcagcctccccgcccggcaccagacccatggctcccagctgcggctccacctcgtctcccctgccgactcaggcgagtatgtgtgtcgtgcagccagcggcccaggccctgagcaagaagcctccttcacagtcaccgtcccgcccagtgaggggtcttcctaccgccttaggagcccggtcatctccatcgacccgcccagcagcaccgtgcagcagggccaggatgccagcttcaagtgcctcatccatgacggggcagcccccatcagcctcgagtggaagacccggaaccaggagctggaggacaacgtccacatcagtcccaatggctccatcatcaccatcgtgggcacccggcccagcaaccacggtacctaccgctgcgtggcctccaatgcctacggtgtggcccagagtgtggtgaacctcagtgtgcacgggccccctacagtgtccgtgctccccgagggccccgtgtgggtgaaagtgggaaaggctgtcaccctggagtgtgtcagtgccggggagccccgctcctctgctcgttggacccggatcagcagcacccctgccaagttggagcagcggacatatgggctcatggacagccacgcggtgctgcagatttcatcagctaaaccatcagatgcgggcacttatgtgtgccttgctcagaatgcactaggcacagcacagaagcaggtggaggtgatcgtggacacgggcgccatggccccaggggcccctcaggtccaagctgaagaagctgagctgactgtggaggctggacacacggccaccttgcgctgctcagccacaggcagccccgcgcccaccatccactggtccaagctgcgttccccactgccctggcagcaccggctggaaggtgacacactcatcataccccgggtagcccagcaggactcgggccagtacatctgcaatgccactagccctgctgggcacgctgaggccaccatcatcctgcacgtggagagcccaccatatgccaccacggtcccagagcacgcttcggtgcaggcaggggagacggtgcagctccagtgcctggctcacgggacacccccactcaccttccagtggagccgcgtgggcagcagccttcctgggagggcgaccgccaggaacgagctgctgcactttgagcgtgcagcccctgaggactcaggccgctaccgctgccgggtcaccaacaaggtgggctcagccgaggcctttgcccagctgctcgtccaaggccctcccggctctctccctgccacctccatcccagcagggtccacgcccaccgtgcaggtcacgcctcagctagagaccaagagcattggggccagcgttgagttccactgtgctgtgcccagcgaccagggtacccagctccgttggttcaaggaagggggtcagctgcctccgggtcacagcgtgcaggatggggtgctccgaatccagaacttggaccagagctgccaagggacgtatatatgccaggcccatggaccttgggggaaggcccaggccagtgcccagctggttatccaagccctgccctcggtgctcatcaacatccggacctctgtgcagaccgtggtggttggccacgccgtggagttcgaatgcctggcactgggtgaccccaagcctcaggtgacatggagcaaagttggagggcacctgcggccaggcattgtgcagagcggaggtgtcgtcaggatcgcccacgtagagctggctgatgcgggacagtatcgctgcactgccaccaacgcagctggcaccacacaatcccacgtcctgctgcttgtgcaagccttgccccagatctcaatgccccaagaagtccgtgtgcctgctggttctgcagctgtcttcccctgcatagcctcaggctaccccactcctgacatcagctggagcaagctggatggcagcctgccacctgacagccgcctggagaacaacatgctgatgctgccctcagtccgaccccaggacgcaggtacctacgtctgcaccgccactaaccgccagggcaaggtcaaagcctttgcccacctgcaggtgccagagcgggtggtgccctacttcacgcagaccccctactccttcctaccgctgcccaccatcaaggatgcctacaggaagttcgagatcaagatcaccttccggcccgactcagccgatgggatgctgctgtacaatgggcagaagcgagtcccagggagccccaccaacctggccaaccggcagcccgacttcatctccttcggcctcgtggggggaaggcccgagttccggttcgatgcaggctcaggcatggccaccatccgccatcccacaccactggccctgggccatttccacaccgtgaccctgctgcgcagcctcacccagggctccctgattgtgggtgacctggccccggtcaatgggacctcccagggcaagttccagggcctggatctgaacgaggaactctacctgggtggctatcctgactatggtgccatccccaaggcggggctgagcagcggcttcataggctgtgtccgggagctgcgcatccagggcgaggagatcgtcttccatgacctcaacctcacggcgcacggcatctcccactgccccacctgtcgggaccggccctgccagaatggcggtcagtgccatgactctgagagcagcagctacgtgtgcgtctgcccagctggcttcaccgggagccgctgtgagcactcgcaggccctgcactgccatccagaggcctgtgggcccgacgccacctgtgtgaaccggcctgacggtcgaggctacacctgccgctgccacctgggccgctcggggttgcggtgtgaggaaggtgtgacagtgaccaccccctcgctgtcgggtgctggctcctacctggcactgcccgccctcaccaacacacaccacgagctacgcctggacgtggagttcaagccactcgcccctgacggggtcctgctgttcagcggggggaagagcgggcctgtggaggacttcgtgtccctggcgatggtgggcggccacctggagttccgctatgagttggggtcagggctggccgttctgcggagcgccgagccgctggccctgggccgctggcaccgtgtgtctgcagagcgtctcaacaaggacggcagcctgcgggtgaatggtggacgccctgtgctgcgctcctcgcccggcaagagccagggcctcaacctgcacaccctgctctacctggggggtgtggagccttccgtgccactgtccccggccaccaacatgagcgctcacttccgcggctgtgtgggcgaggtgtcagtgaatggcaaacggctggacctcacctacagtttcctaggcagccagggcatcgggcaatgctatgatagctccccatgtgagcgccagccttgccaacatggtgccacgtgcatgcccgctggcgagtatgagttccagtgcctgtgtcgagatggattcaaaggagacctgtgtgagcacgaggagaacccctgccagctccgtgaaccctgtctgcatgggggcacctgccagggcacccgctgcctctgcctccctggcttctctggcccacgctgccaacaaggctctggacatggcatagcagagtccgactggcatcttgaaggcagcgggggcaatgatgcccctgggcagtacggagcctatttccacgatgatggcttcctcgccttccctggccatgtcttctccaggagcctgcccgaggtgcccgagaccatcgagctggaggttcggaccagcacagccagtggcctcctgctctggcagggtgtggaggtgggagaggccggccaaggcaaggacttcatcagcctcgggcttcaagacgggcaccttgtcttcaggtaccagctgggtagtggggaggcccgcctggtctctgaggaccccatcaatgacggcgagtggcaccgggtgacagcactgcgggagggccgcagaggttccatccaagtcgacggtgaggagctggtcagcggccggtccccaggtcccaacgtggcagtcaacgccaagggcagcgtctacatcggcggagcccctgacgtggccacgctgaccgggggcagattctcctcgggcatcacaggctgtgtcaagaacctggtgctgcactcggcccgacccggcgccccgcccccacagcccctggacctgcagcaccgcgcccaggccggggccaacacacgcccctgcccctcgtaggcacctgcctgccccacacggactcccgggccacgccccagcccgacaatgtcgagtatattattattaatattattatgaatttttgtaagaaaccgaggcgatgccacgctttgctgctaccgccctgggctggactggaggtgggcatgccaccctcacacacacagctgggcaaagccacaaggctggccagcaaggcaggttggatgggagtgggcacctcagaaagtcaccaggacttggggtcaggaacagtggctgggtgggcccagaactgcccccactgtcccctaccac

SEQ ID NO: 124 - DNA, 3719 bp, Homo sapiens
  misc_feature: Incyte ID No: 1383106.7
acaccttctcacaggactggagagagaatgcggggcagctgggcagggctcacttccagccgcctgtcacagtactgggagtaagaggtgacctatttatttttagaagggggcagtgataataacccagctcctagcttcattcaagggaggcaggcgctttggaagtttgtaaacaccgactttctgagtaagggaggagcactttttttccaaaaaggaaagaacgtctctactgggtttttttcctcctgatattcagcattagagtagaaaagaaactattgtttggccacattagccgtggttagcaggtgctgcagcctttgccactgttattatttttaaagggcagaaatgcctgaaggtgaagactttggaccaggcaaaagctgggaagttatcaattccaaaccagatgaaagacccaggctcagccactgtattgcagaatcatggatgaatttcagcatatttcttcaagaaatgtctctttttaaacagcagagccctggcaagttttgtctcctggtctgtagtgtgtgcacattttttacgatcttgggaagttacattcctggggttatactcagctatctactgttactgtgtgcatttttgtgtccattgtttaaatgtaatgatattggacaaaaaatttacagcaaaattaagtcagttctgctgaaactggattttggaattggagaatatattaatcagaagaaacgtgagagatctgaagcagacaaagaaaaaagtcacaaagatgacagtgaattagacttttcagctctttgtcctaagattagcctcacggttgctgccaaagagttatctgtgtctgacacagacgtctcagaggtatcctggactgataatgggaccttcaacctttcagaaggatacactccacagacagacacttctgatgatcttgaccgacccagtgaggaagttttctctagagatctttcagattttccatctctagaaaatggcatgggaacaaatgatgaagatgaattaagccttggtttgcccactgagctcaagagaaagaaggaacagttggacagtggtcacagaccaagcaaagagacgcaatcagcagctggtctcacccttcctctgaacagtgaccaaacctttcacctgatgagcaacctggctggggatgttatcacagctgcagtgactgcagctatcaaagaccagttagagggtgtgcagcaagcactttctcaggctgcccccatcccagaagaggacacagacactgaagaaggtgatgactttgaactacttgaccagtcagagctggatcaaattgagagtgaattgggacttacacaagaccaggaagcagaagcacagcaaaataagaagtcttcaggtttcctttcaaatctgctgggaggccattaatctaggaatcagcttgcaacagagcacaaaaaacaccaaaaaaatttcaaacaagaaaaaaataaaaaaaaggaaaagaaaaaaattgaactgtaagctttaatgattactttagatttgttttattttccctcctgcagtgaattaattggatatatatcagctgacactgatagattgatatttctgatcgttatttttgtgtaataagcatggaaatgaactttatacacaccactgtgttgtcagagataaatattaggggttgtttttaaagcaaaaagaaaaaaacaaaaaccaaactattaaaatcctcctataaatattctttttctttacagtttttcaagcatgcaaaacagtttattgtaacttactgaaaaatattaacaattaattgtgaatacatgctgttaccagcttccttattcctaatacctggaaaatttttttttcaacggatagattttgatgtaaaaaagaccgaaattatcaaggtatcttagttgaaggacttgggaaatactatcaaaattaatttcttaggaaaaaatttaaaagtatatttaagtactctggatagactgaaacgtttccatgttatttctgcagttgtagacttaggcttatttgtaaagaagcatgctccattgactgccatctctagtcttgcagtgggtggtattaacccatagaaagcaagcagttgtgtatcacatagacaatggttatgatgtaaacagattcagttgttttgttgttcattcgtcatatgtttgtgatagggatgttgggagcacagctctattctgcctgctcagacttaagttagacccttatcttttatattatgtcatgaaaaaagtctcctaaaattgtgaaactagttcttgatgagtgatgtgatcatcagcaataaagatataataactctgttttcttagcctgtatagaggagaggaacttgcttggctttaaaatatatttatttgccatttaagtataaatatggaatctgtttcttattgggaagatagaatatatatattttcctttaaactttttaaggtcacttttaaataaccaaatttgatttatggtttttaacaaaggactaaagagctgaaaccaacctagttttgtttttgtgatataaactttaagtgtcgagggaccatgccagcaactaccaaaaatctcttaaatcttcaggtacagctggcattttggcagatgcatagagacatctgagaccctcagaaaggaaggataatccaagaatataggaaatctgtgttctcttcctttcattttatcccttatatttctaaagactaattataagtaatctgacattttaatgtagctactcttatttattttttctttctgaggtattaaaatatctggactgagttttgccaaatgttaaagggagaagagttactgaagactttgaacacttgctttttgtgattgcttatgtcattagtgcctcatgactgtgtttgatgtcctttattgatacaaagtgagcctgtgccttcattatcttgcccattttaatacaaatggaaacctggtgtttgaaaatctctgaactgtgtgggttttggaggaatatacctgaattttattcaataacagtttctggacaggaagaaaaatacagttacatatttataaaatagtcgttatcagtatttttttatgtgtatgtttctttctttaaaacaatattcttggatataaagtagaaaagtttaaaggtcatttccatttcttcactaaggagaaaaaaagttaaataatccaagtaattaaagaatataagtcactagatgaccttacaggaagacgaactcaagggctgataatctgtggtggtatgaacaataaatctagaataaaatgttaataactacaaattaaaaggggtgtgaggatgggaggaagttggtagggtagaaaaatgtgctattaccactattgaggagacatgccagctctctagggacagcagcattataactatgtatgaattttaatattatttgtatatgactgtatgactacaaatttacacaatacaataatgggactttctcacaactattaattcaaacaaacacaaggatgttgaaggttcttgtttgtgtatatgtgtgtttaggtggtggggggtcactgtttctggttttaaaacgatgaaggagcagatacatttcatatgattgatccagtgtagtaaaggactacatgtcctttactatgagaatataatagcaata

SEQ ID NO: 125 - DNA, 1348 bp, Homo sapiens
  misc_feature: Incyte ID No: 1510895.1
  unsure 1014, 1342: a, t, c, g, or other
cagcagatggtcgtttgttccacataatcttgtgagcaccttcctttgctgtgttggagcatgatgatagggacagggggccagagctggagtggagggacatcgggagggctgggaatacagatcagggtccctaagccagccctagaggctggaggtggggaggagccttccctaggagcagtggtctaggctgtgacccaaaggacagcagtgggggcacctcctgccaggtggggagtgtcccaggccgagggaggagccgtgcagtggctcaggggcagaaggaggacacctgctgtccagggctcagggagaagtgtggtgcagctgggagggggctctaagacctcctcctctcacccccagggaacctaatgcccctctctggccctgcacccctctactcaggggaaaccagggctcgcctgctgctccaggtgccccgacccagcgatcgggtgcagagctctgcgtttcaggaatgagaggcaggtcttcatgcaagccatatttttgagaatggttctctgttcactcaacacatacaaacctggcagacccagatcaccatctgggatggaggcacccaggtggcagaaggggagaagaactgtgggtggacgtgcagggagagcagctgcagctggcactgcagtgggtgctggcccaggagacactggctgccgttcaccatgcagcaaagctttatcaagcgcacactgggcagccatggggcgggtaccacggccagtaacgagcaagaaggatgccatcctgccctctctgaacttatagtctgctagggaagacagacactgtgacaaactaaggttggggagggcagccacagagtaggtgcaggagcatctattctgggtaggcttcctggaggaggcagcacagtgtgccgagccctgaaggataagcataagccaagagaagtgggtggattatttaaggccctgaaggacatgaggcatggttccctttgttcctgggaacacgcaaganagcccatgtgcgctggcctcggccgggtctgtgggtacagtgcgtttccaggtagttcccccgagaagaccacagtgtgagtgaagcccagggcagtgcggacgtggggctttgttgctgtgtgtgtccccaccctgctgagccccaacacccctgtccccccagctctcctatgtggacgccgagggcaaccctgtgggtgtggtacagatgaccttcctgcggctgctgagcgcctctgcccaccagaacgtcacctaccaactgctaccagtcagtggcctggcaggaacgcagccacgggcagctaacgacaaagggccttcgntttctg

SEQ ID NO: 126 - DNA, 5021 bp, Homo sapiens
  misc_feature: Incyte ID No: 1454873.5
gagaaacttaacttaataaagaatctgtagagtgtgttggcttggaaaacacacacacaaagaagatacctcacgcttagtatgttaagtttctctaagtaaatgtgtaactcatggtcactgtgtaaacattttcagtggcgatatatcccctttgaccttctcttgatgaaatttacatggtttcctttgagactaaaatagcgttgagggaaatgaaattgctggactatttgtggctcctgagttgagtgattttggtgaaagaaagcacatccaaagcatagtttacctgcccacgagttctggaaaggtggccttgtggcagtattgacgttcctctgatcttaaggtcacagttgactcaatactgtgttggtccgtagcatggagcagattgaaatgcaaaaacccacacctctggaagataccttcacggccgctgctggagcttctgttgctgtgaatacttctctcagtgtgagaggttagccgtgatgaaagcagcgttacttctgaccgtgcctgagtaagagaatgctgatgccataactttatgtgtcgatacttgtcaaatcagttactgttcaggggatccttctgtttctcacggggtgaaacatgtctttagttcctcatgttaacacgaagccagagcccacatgaactgttggatgtcttccttagaaagggtaggcatggaaaattccacgaggctcattctcagtatctcattaactcattgaaagattccagttgtatttgtcacctggggtgacaagaccagacaggctttcccaggcctgggtatccagggaggctctgcagccctgctgaagggccctaactagagttctagagtttctgattctgtttctcagtagtcctttttagaggcttgctatacttggtctgcttcaaggaggtcgaccttctaatgtatgaagaatgggatgcatttgatctcaagaccaaagacagatgtcagtgggctgctctggccctggtgtgcacggctgtggcagctgttgatgccagtgtcctctaactcatgctgtccttgtgattaaacacctctatctcccttgggaataagcacatacaggcttaagctctaagatagataggtgtttgtccttttaccatcgagctacttcccataataaccactttgcatccaacactcttcacccacctcccatacgcaaggggatgtggatacttggcccaaagtaactggtggtaggaatcttagaaacaagaccacttatactgtctgtctgaggcagaagataacagcagcatctcgaccagcctctgccttaaaggaaatctttattaatcacgtatggttcacagataattctttttttaaaaaaacccaacctcctagagaagcacaactgtcaagagtcttgtacacacaacttcagctttgcatcacgagtcttgtattccaagaaaatcaaagtggtacaatttgtttgtttacactatgatactttctaaataaactctttttttttaaaagtctggtctttccttcaatgttacagcaaaacagatataaaatagacaataaattatagtttatatttacaaaaaaagctgtaagtgcaaacagttgtagattataaatgtattatttaatcagtttagtatgaaattgccttcccagtacatgattgtgaaaaagacatttagaaaatattctaaaatttaatctgagcctcactttctacaagggaaatcatgatttccgttcataaacagcatgctcatccccctaacaccattcttataagctgggcaccctcattttattttcttcgttggttctaaccctgtggcgtggtatgctgtatagtaaaaaggcagagaaccactttactgaaaaggtactagagccggcagtccagaagttaatgtgctggtcaaagaaccgttctggtaaagaagaggtgagcattgccttcacgtgttacacggttacacaccccttgtagcctcacctcagtgtaatcagtctacttttggtactagcaaagagtacagcaaatggaggattgaggtgtagaaatggtatgttttggctgaaataagtgtattttcacaccaacaaaactccagcacgaacatacaacagcaatgactgagacaagggcgccccgtggagccctggctgtggcctgggctgtgcgtcctgtggacttctgggaatgaactgaacagaggcgttccccccacttccccgatttctgttctctgtaaaatctacctttgatagacagtactgaaccagctgatcctttagccaagaatacatttaactcctttgagattattttccctatttactaacaaacaccccaaatagcttgatctacagctaaaactaattttggtgggtttttgggggaggagggtaggaagagcttcacggttatgtttctgcagttaccagaccttatgctacagacatccaaactcagcttgctacagaccaacaactactcacgtcatttaccaagtgagcaaattattaatgaggtcctttaaaatcttcctgggtaataaggcactggcatgagatagtttcaaagtctcatcgtcccacctccaactgtgcttccgtgtttttttaaggcagatgtaatctaggaatccaaggcagaatgtgtgtccccagcatctggtttcgagttagtggcatccacaagctcttacaaccatattcctgtattttttcagaatgacattggagttgtcatcaaagtaaagaaccgagatggcatttagcttagttggcgcacagcacggtttggggacatactcggggttcataaggtgaaccaaggtctgcacaatcgcgtggttggttgcattcatgtgtgcgttgagtgggaaggagcattctccatcacagtaattggcagcatagcccttgggtgcaatgatccagtcctgccatcccaggtcttggaaactcacatacagctcatgcttcctgcaggctgttttcaattcactgctgttgtaatctgaagcactggagacccgcgccacgtcctgggactgggtagagcgattacgactctgttgtcggcgccggctggaggctgacctggtggtgcgcacgtggacctcactcactttgaagaaagccaccatgaagggctgcttgtcgtaagggccgtctctgcccaccaggcctgcggctcgggggtggacgtggactccatcccttgtcaccacgctcagctgaagccccatgttatgctgtggagtcacaacccacagattgctagtggccgtgatgtcaaattccagccagccttcttctgaggcccatactacacgggtgtccaacaaaaacaggtcagagtctctgtgctgatgctcctgtaagacttgataaatgctgataagaaaagtttggtttttaaaactccccataacacagtccttgtagatgcggaattctgcagccgtcaccacctcaccctcaggaatctgggataagttgaacttgaactctttgtggtgtcgctgacgaggggagaactccttgtcgtactccaccaggttcacaaagctcatgaccatgtccgcgtcgttgaggaaggcgctgtcctgcgcgctggtcagtggggacgcgccgccgctgccagatccgggggccagaaggctcttgcggttgagcgggtgcgcggcgcccgggggcggctgccgacgctgggacgagctggctgcttcgtggggccaggactgctgcctctccccctccgacgccccgtcctcgtcgttgtcggcggacagggcgttgtacagatccagcatgaagaggggcgcggacttcagtcgcccgggagggggctctccgcgaggcagctgctgctgctgctgctgctcctcctgctgccggagcgccgggggctgcggctgttggaggccgtgcaggggccggggccggtgcgggagccccagcaccgacaagatctccttctgcatctcccgcttctcctgcgtcttgagccgccggtacaggaagcccgaggaggactgcggcgacggcggcggctgctccgtgcggccggggctcccgccgtcccccagcagctgccccccggcggcggcggccgcggcagcgggcaagggcggccgcagcggcgggggcccgcagcagctgcacagcagcccccaccaccagcacagccactgcgccctccgccccagccccggcatccccgcccggccgggctgcccccgcggatcccgcgaggcgtggagcggcggagcgaggccggagcgcggccgctgtggcccttggcgtgagcagtccccgccacctctcggcgggctcgcttccccttcctggccctcagtccttatctctcatggtcgtccggggcgcccccagttgcccaggctagagaggtggcgaaggggcgatcaccaggagaaccgcttggaggggaggaaggggagcctcacagcctcgcgcaggtctctagaggcgcgcggtccaggccaggtgcgtctgagtccgggctgcactgcagcctgcgccctggctcctgcgagtcgcggcgcggtcactctgggcctcgctggccgcacacgtgcgctgccccgcgctctccctggcgactgagtgggacccggggcagcggggagcggggccgctcacgagctgcgggagatgcccggcatcaccgtggcgcacgcccctccccagatcgcagggccaccatgaagtttaccccgttgcagggcccaggctgcggcgacaaggcgtcccgaaatgccagtctattccgcgaggtttaacttccttctcgctcacgaactccgcgcccctgagctctcgggcaccgtcgctcccactcaaaatctccgcgcgccgcacgcctcctcaagcggaggcggcgaggatcttgctttccgttcggcggtcgcccggctgcccagcaaacccgctcgcagaaaggatgggaaggaagggggctagtgcaccgagc

SEQ ID NO: 127 - DNA, 415 bp, Homo sapiens
  misc_feature: Incyte ID No: 222836.2
gcctcgtgccgaattcggcacgaggttccacctgctcacaggttggctggctcagccaaggtggtgccctgctctgagcattcaggccaagcccatcctgcaccatggccaggtacagatgctgtcgcagccagagccggagcagatattaccgccagagacaaagaagtcgcagacgaaggaggcggagctgccagacacggaggagagccatgaggtgctgccgccccaggtacagaccgagatgtagaagacactaattgcacaaaatagcacatccaccaaactcctgcctgagaatgttaccagacttcaagatcctcttgccacatcttgaaaatgccaccatccaataaaaatcaggagcctgctaaggaacaatgccgcctgtcaataaatgttgaaaagtcatccc

SEQ ID NO: 128 - DNA, 1640 bp, Homo sapiens
  misc_feature: Incyte ID No: 3098081cB1
cgcacagcccgcactgccccacgccgcgggctagggacacccggcccgccaccatgacttccagcaagatagagatgcccggcgaggtgaaggccgaccccgccgccctcatggcgtcgctgcacctcctgccgtcgcccacgcccaatctcgaaattaagtacaccaagatctttataaacaacgagtggcagaactcagagagtgggagagtgttccctgtctataatccagccacaggagaacaggtgtgtgaagttcaagaagcagacaaggcagatatagacaaagcagtgcaggcagcccgcctggctttctctcttggttcagtgtggagaaggatggatgcttcagaaaggggacgtctgttggataagcttgcagacttggtggaacgggacagggcagttcttgcaaccatggaatccctaaatggtggcaaaccattcctgcaagctttttatgtggatttgcagggcgtcatcaaaacctttcgatattacgcaggctgggctgataaaattcatgggatgaccattcctgtagatggagactattttacctttacaagacatgaacccattggagtgtgtggacagatcatcccatggaacttccccctgctgatgtttgcctggaaaatagctccagctttgtgctgtggcaatacagtagttattaagccagcagagcaaacaccactcagtgcactctacatgggagccctcatcaaggaggctggctttcctcccggggtcatcaatattttgccaggatatgggccaacggctggggcagcaatagcttctcacattggcatagacaagattgcattcacagggtctactgaggttggaaagcttatccaagaagcagctggaagaagtaatttgaagagagtaactctggaacttggaggcaaaagtcctaatattatttttgctgatgctgacttggactatgctgtggagcaggcccaccagggtgtgttcttcaatcaaggtcagtgctgcactgcaggctctcgcatcttcgtggaggagtccatctatgaggagtttgtgagaagaagcgtggagcgggccaagaggcgcatagtggggagtccctttgaccccaccactgagcagggtccccagattgataagaaacagtacaacaagatcttggaactcatccagagtggtgtggctgagggcgccaagctggaatgtggaggcaaaggactgggccgaaaggggtttttcattgagcccacagtgttttccaacgtcactgatgatatgcggattgccaaggaggagatctttggccctgttcaggaaattttgagatttaagacgatggatgaagttatcgaaagagccaataactcagactttggactcgtagcagctgtctttactaatgacatcaacaaggccctcacagtgtcttctgcaatgcaagctgggactgtttggatcaattgttacaatgccttaaatgcccagagcccctttgggggattcaagatgtctggaaatgggagagaaatgggagaatttggcttgcgggagtactcagaagttaagacggtgacagtaaagatcccccagaagaactcctaagaaggccaagaaggaggatgaagcccagcc

SEQ ID NO: 129 - DNA, 1083 bp, Homo sapiens
  misc_feature: Incyte ID No: 1383398.6
ctggctttcttgctctccctcatctcattgtttcagcggaggccaaatctgaagtcctttccagggagtggctctgttcatcttattcgccagccaaagtaggaacagcgtaagaggagagagacacattcagcagccaaaggactcggtggaaagagcagaacaccatagacaatatgtcgctcttgggacccaaggtgctgctgtttcttgctgcattcatcatcacctctgactggatacccctgggggtcaatagtcaacgaggagacgatgtgactcaagcgactccagaaacattcacagaagatcctaatctggtgaatgatcccgctacagatgaaacagttttggctgttttggctgatattgcaccttccacagatgacttggagtgctgggatgagaaatttacctgcacaaggctctactctgtgcatcggccggttaaacaatgcattcatcagttatgcttcaccagtttacgacgtatgtacatcgtcaacaaggagatctgctctcgtcttgtctgtaaggaacacgaagctatgaaagatgagctttgccgtcagatggctggtctgccccctaggagactccgtcgctccaattacttccgacttcctccctgtgaaaatgtggatttgcagagacccaatggtctgtgatcattgaaaaagaggaaagaagaaaaaatgtatgggtgagaggaaggaggatctccttcttctccaaccattgacagctaacccttagacagtatttcttaaaccaatccttttgcaatgtccagcttttacccctactctctactttttcacccaaactgataacatttatctcattttctagcacttaaaatacaaagtctgtattattcttggcactcaagattgttgaagtctactgcactttgtactttcacattctcaaataaaaacttaaggttataaagtgtgcataaacattttataaaataattttgtcaatttacaaaattgggaaaggagactttataccgcaattttacataagaggataaatatgaatgaaacttccttttaaagtcaaatgacagaaagc

SEQ ID NO: 130 - DNA, 1961 bp, Homo sapiens
  misc_feature: Incyte ID No: 1383398.7
ctctcaccagtgtagtcataacatttggaatgagggtgtgagcaactgcaaattcccatctcccttctcattccagcctcattgtaacacacattctacgcctagcctggctttcttgctctccctcatctcattgtttcagcggaggccaaatctgaagtcctttccagggagtggctctgttcatcttattcgccagccaaagtaggaacagcgtaagaggagagagacacattcagcagccaaaggactcggtggaaagagcagaacaccatagacaatatgtcgctcttgggacccaaggtgctgctgtttcttgctgcattcatcatcacctctgactggatacccctgggggtcaatagtcaacgaggagacgatgtgactcaagcgactccagaaacattcacagaagatcctaatctggtgaatgatcccgctacagatgaaacagttttggctgttttggctgatattgcaccttccacagatgacttggcctccctcagtgaaaaaaataccactgcagagtgctgggatgagaaatttacctgcacaaggctctactctgtgcatcggccggttaaacaatgcattcatcagttatgcttcaccagtttacgacgtatgtacatcgtcaacaaggagatctgctctcgtcttgtctgtaaggaacacgaagctatgaaagatgagctttgccgtcagatggctggtctgccccctaggagactccgtcgctccaattacttccgacttcctccctgtgaaaatgtggatttgcagagacccaatggtctgtgatcattgaaaaagaggaaagaagaaaaaatgtatgggtgagaggaaggaggatctccttcttctccaaccattgacagctaacccttagacagtatttcttaaaccaatccttttgcaatgtccagcttttacccctactctctactttttcacccaaactgataacatttatctcattttctagcacttaaaatacaaagtctatattattgcataattttgctgcttctcaatatcatagacacagtgaatagatgatgactatatggcttatatacaaacattctatgtacaatttcaagggagactaaactttaggctaataatctttactattgaatctgtctgatatagatcttagggttgaagaagctatctttgtctatttgggctaaccatagaatttcatttattttcctcacaatattttcctagaccaactccccatcattcacgtgttcctctttactcttactttaactattttgctggcttgcccgaaaatttgcctggcaagtcttccttataagacacatcatggtaagttttgtagtcctgtaagattctgcaacacagtcaagaattatacaatcctactagcaatatataaggacccaaaatgtcttctgctaagctcagaggctggggctaaagcatgaggactatgccagctatagaacttggactcataattcgctatccaatttttcatgcagttgtctagtcgggaagtaaggttggaaactaagtctcatttactgattcgtttatgggtagtaccgggatgaacccaccaccacaaagcaaattagacaacttaatgtgaaatcataccattggttgacgtttccttgagttgctacttcgttcatcttcacaacttaacaagtgcacggtcgaattattgtgcaagtggcttttggatatcctgattggggcctaagaagggcattcagacttgaattttaataggcagacagaaagtttgcctaatagttaatacgaaagagtgaaagaaacacaatattcagacaacccacattcttatcctggctctagcagtaaccacgtagccttggataagccattttccttcattaggtcctggtttaatttcctcatctttaaaatgagaaggttaaatttatcttagtact

SEQ ID NO: 131 - DNA, 1312 bp, Homo sapiens
  misc_feature: Incyte ID No: 198862.10
ctcctctaggccgccggccgcgaagcgctgagtcacggtgaggcgactggacccacactctcttaacctgccctccctgcactcgctcccggcggctcttcgcgtcacccccgccgctaaggctccaggtgccgctaccgcagcgtgagtacctggggctcctgcaggggtccactagccctccatcctctacagctcagcatcagaacactctctttttagactccgatatggggtcctccaagaaagttactctctcagtgctcagccgggagcagtcggaaggggttggagcgagggtccggagaagcattggcagacccgagttaaaaaatctggatccgtttttactgtttgatgaatttaaaggaggtagaccaggaggatttcctgatcatccacatcgaggttttgaaacagtatcctacctcctggaagggggcagcatggcccatgaagacttctgtggacacactggtaaaatgaacccaggagatttgcagtggatgactgcgggccggggcattctgcacgctgagatgccttgctcagaggagccagcccatggcctacaactgtgggttaatttgaggagctcagagaagatggtggagcctcagtaccaggaactgaaaagtgaagaaatccctaaacccagtaaggatggtgtgacagttgctgtcatttctggagaagccctgggaataaagtccaaggtttacactcgcacaccaaccttatatttggacttcaaattggacccaggagccaaacattcccaacctatccctaaagggtggacaagcttcatttacacgatatctggagatgtgtatattgggcccgatgatgcacaacaaaaaatagaacctcatcacacagcagtgcttggagaaggtgacagtgtccaggtggagaacaaggatcccaagagaagccactttgtcttaattgctggggagccattaagagaaccagttatccaacatggtccatttgtgatgaacaccaatgaagagatttctcaagctattcttgatttcagaaacgcaaaaaatgggtttgaaagggccaaaacctggaaatcaaagattgggaactagtggaaagcggaagagcaggtcttgatgtgtcctagaattttgccatttctgagattgagccattgaaggcattccatttctaaagcttatttagccggtgcttctaaagaattccacactaacgtgataacatggtttttgtaacaataaatgtaggatatttcctggcacatgcaaataaacctaatcattgtttctttaaaatttta

SEQ ID NO: 132 - DNA, 4660 bp, Homo sapiens
  misc_feature: Incyte ID No: 2515360cB1
gagactagttctctctctctctctcctgaaaaagggggtttgcagaggctgccctggggctggtgctgaaagaagagcccacagctgacttcatggtgctacaataacctcagaatctacttttcactctcaggagaacccacatgtctaatatttagacatgatggcaaactgggcggaagcaagacctctcctcattcttattgttttattagggcaatttgtctcaataaaagcccaggaagaagacgaggatgaaggatatggtgaagaaatagcctgcactcagaatggccagatgtacttaaacagggacatttggaaacctgccccttgtcagatctgtgtctgtgacaatggagccattctctgtgacaagatagaatgccaggatgtgctggactgtgccgaccctgtaacgccccctggggaatgctgtcctgtctgttcacaaacacctggaggtggcaatacaaattttggtagaggaagaaagggacaaaagggagaaccaggattagtgcctgttgtaacaggcatacgtggtcgtccaggaccggcaggacctccaggatcacagggaccaagaggagagcgagggccaaaaggaagacctggccctcgtggacctcagggaattgatggagaaccaggtgttcctggtcaacctggtgctccaggacctcctggacatccgtcccacccaggacccgatggcttgagcaggccgttttcagctcaaatggctgggttggatgaaaaatctggacttgggagtcaagtaggactaatgcctggctctgtgggtcctgttggcccaaggggaccacagggtttacaaggacagcaaggtggtgcaggacctacaggacctcctggtgaacctggtgatcctggaccaatgggtccgattggttcacgtggaccagagggccctcctggtaaacctggggaagatggtgaacctggcagaaatggaaatcctggtgaagtgggatttgcaggatctccgggagctcgtggatttcctggggctcctggtcttccaggtctgaagggtcaccgaggacacaaaggtcttgaaggccctaaaggtgaagttggagcacctggttccaagggtgaagctggccccactggtccaatgggtgccatgggtcctctgggtccgaggggaatgccaggagagagagggagacttgggccacagggtgctcctggacaacgaggtgcacatggtatgcctggaaaacctggaccaatgggtcctcttgggataccaggctcttctggttttccaggaaatcctggaatgaagggagaagcaggtcctacaggggcgcgaggccctgaaggtcctcaggggcagagaggtgaaactgggcccccaggtccagttggctctccaggtcttcctggtgcaataggaactgatggtactcctggtgccaaaggcccaacgggctctccgggtacctctggtcctcctggctcagcagggcctcctggatctccaggacctcagggtagcactggtcctcagggaattcgaggccaaccgggtgatccaggagttccaggtttcaaaggagaagctggcccaaaaggggaaccagggccacatggtattcagggtccgataggcccacccggtgaagaaggcaaaagaggtcccagaggtgacccaggaacagttggtcctccagggccagtgggagaaaggggtgctcctggcaatcgtggttttccaggctctgatggtttacctgggccaaagggtgctcaaggagaacggggtcctgtaggttcttcaggacccaaaggaagccagggggatccaggacgtccaggggaacctgggcttccaggtgctcggggtttgacaggaaatcctggtgttcaaggtcctgaaggaaaacttggacctttgggtgcgccaggggaagatggccgtccaggtcctccaggctccataggaatcagagggcagcccgggagcatgggccttccaggccccaaaggtagcagtggtgaccctgggaaacctggagaagcaggaaatgctggagttcctgggcagaggggagctcctggaaaagatggtgaagttggtccttctggtcctgtgggcccgccgggtctagctggtgaaagaggagaacaaggacctccaggccccacaggttttcaggggcttcctggtcctccagggcctcctggagaaggtggaaaaccaggtgatcaaggtgttcctggagatcccggagcagttggcccgttaggacctagaggagaacgaggaaatcctggggaaagaggagaacctgggataactggactccctggtgagaagggaatggctggaggacatggtcctgatggcccaaaaggcagtccaggtccatctgggacccctggagatacaggcccaccaggtcttcaaggtatgccgggagaaagaggaattgcaggaactcctggccccaagggtgacagaggtggcataggagaaaaaggtgctgaaggcacagctggaaatgatggtgcaggaggtcttccaggtcctttgggccctccaggtccggcaggcctactgggagaaaagggtgaacctggtcctcgaggtttagttggtcctcctggctcccggggcaatcctggttctcgaggtgaaaatgggccaactggagctgttggttttgccggaccccagggtcctgacggacagcctggagtaaaaggtgaacctggagagccaggacagaagggagatgctggttctcctggaccacaaggtttagcaggatcccctggccctcatggtcctaatggtgttcctggactaaaaggtggtcgaggaacccaaggtccgcctggtgctacaggatttcctggttctgcgggcagagttggacctccaggccctgctggagctccaggacctgcgggacccctaggggaacccgggaaggagggacctccaggtcctcgtggggaccctggctctcatgggcgtgtgggagtccgaggaccagctggcccccctggtggcccaggagacaaaggggacccaggagaagatgggcaacctggtccagatggcccccctggtccagctggaacgaccgggcagagaggaattgttggcatgcctgggcaacgtggagagagaggcatgcccggcctaccaggcccagcgggaacaccaggaaaagtaggaccaactggtgcaacaggagataaaggtccacctggacctgtggggcccccaggctccaatggtcctgtaggggaacctggaccagaaggtccagctggcaatgatggtaccccaggacgggatggtgctgttggagaacgtggtgatcgtggagaccctgggcctgcaggtctgccaggctctcagggtgcccctggaactcctggccctgtgggtgctccaggagatgcaggacaaagaggagatccgggttctcggggtcctataggacacctgggtcgagctggaaaacgtggattacctggaccccaaggacctcgtggtgacaaaggtgatcatggagaccgaggcgacagaggtcagaagggccacagaggctttactggtcttcagggtcttcctggccctcctggtccaaatggtgaacaaggaagtgctggaatccctggaccatttggcccaagaggtcctccaggcccagttggtccttcaggtaaagaaggaaaccctgggccacttgggccattgggacctccaggtgtacgaggcagtgtaggagaagcaggacctgagggccctcctggtgagcctggcccacctggccctccgggtccccctggccaccttacagctgctcttggggatatcatggggcactatgatgaaagcatgccagatccacttcctgagtttactgaagatcaggcggctcctgatgacaaaaacaaaacggacccaggggttcatgctaccctgaagtcactcagtagtcagattgaaaccatgcgcagccccgatggctcgaaaaagcacccagcccgcacgtgtgatgacctaaagctttgccattccgcaaagcagagtggtgaatactggattgatcctaaccaaggatctgttgaagatgccatcaaagtttactgcaacatggaaacaggagaaacatgtatttcagcaaacccatccagtgtaccacgtaaaacctggtgggccagtaaatctcctgacaataaacctgtttggtatggtcttgatatgaacagagggtctcagttcgcttatggagaccaccaatcacctaatacagccattactcagatgacttttttgcgccttttatcaaaagaagcctcccagaacatcacttacatctgtaaaaacagtgtaggatacatggacgatcaagctaagaacctcaaaaaagctgtggttctcaaaggggcaaatgacttagatatcaaagcagagggaaatattagattccggtatatcgttcttcaagacacttgctctaagcggaatggaaatgtgggcaagactgtctttgaatatagaacacagaatgtggcacgcttgcccatcatagatcttgctcctgtggatgttggcggcacagaccaggaattcggcgttgaaattgggccagtttgttttgtgtaa

SEQ ID NO: 133 - DNA, 2847 bp, Homo sapiens
  misc_feature: Incyte ID No: 334180.6
ttttcacttaccttattgagcgtgattctgttctacttgatatttccttcaccacctcatgtcatttctcatggatttggttatgatggaaaggaagaatgcagaggaggagaaaagtgacagatcctccatttttgttgggatgcgggcattttgaatgtgatcatctttgctgaatgtcattatttgataacattttgtttatgttacttaaacatcattggataaatttgaactccatgggattttatctgtggattcagcttctgttggacaactagcctcatctccagtatcctgctggttcagtctaattggtcattcctaatgcattagattatcaaaaagtataaattcgctgtgagtgagtggtgttggcagtgtttgtataccatgatgcatggagtgtttgacgaagaaacaaaaaacaccaaaaattgcgagcctttaccctcctctatttctttaatctgttgtttgaagaaccgcattttgagggtgtaaccagtagtcacctctgggccaggttggaaaagaaatcaattttttaaaccactaatgcttgccaagaaatcgccttatgagaacatggtgtgtgtctctgacaatgcgtggcacatctaaattgatcattcataattttatctacccagtcatgtactggagagtggcaaaagtctgaggcacctgcatatctctagtccctgtgttctgcacatccccacggtggggacgccaccaagcctcagactcttaccatcccggtgcatgcaggtctccatgaagaagctgggactcattcacatttcaagatccaaatgctgtgcaaacagtgtaagcttagattttctgtaaatgaagggtcatttctctttttttttttttttaaagaaaatgtgtctgcaacatggattccaaagcattttcagcatcaaacatgaaaactattgatgaatgaggaacaatcacaaaagctgtgtctctgtatatagctctacacaacatgtttgtggatacagtcattatttaaagcacatgccagggaaaaagaccaaatttggaggtcttttacatacagtgatatggtactaaggagaattaaactcctactgcttcctctgaatattaagaaacaatttaaattgttataacttcataaaactcatgactgagtctggcaaacatgtgcaactcttgtattgctccattttcttgtcaatggaagaaacccttccacgtgtatgcaagtgggagatgaaaacctgcatttttaaaggacaaacagtgaatttaagcatgagtggccttaataaatatagttgtctttctttgctgctgtggaaaggattctaaacagatgtccctgaagtcttgcattgaatttagtcattattattactttttaaaatgttggtgcaattaactctggacctctcttgtgagccatagagatatttaaaagacaaacaccttatttgtcggggaagatgaaaccgtccctgagttgcaccattctttcttggtgcattcgcggttaagatactcaagcaggtttcttgcttctggctttgttcttgtcatcagtaagtataacaaactatgtaatgcttatgtgttgcataaacaatccaaatgcattcatgttttaaaagtttgtcctttaactatcagagggatctaggtcttggttagagaagtaagcagagttctttgcaagcttatttagcacattttgacacaatgttgcactgaaaacccaggccacaaatgtgtcccagtgaacagtttggatgtcctcaaagaagtggttctcactgcctcctacaaccaggtcttgacctgaactctgcaactgaatacttgaagtaggaagtaggaaatccagtagggaaaatagggtccttgaaacagaaaaaaaaaaccaacccatgtatagctagctatttctatgtatgtgccaattttgtcacagctcttgtttggagggatcattttctgcccaactttcattggttaaaatattactgatcttacctttatgaggtcgtataatttagtcccttaaaaattaaattctctctaacataacaacctttcccatttcgtgtaatattctctgatgtttgggggttaccaaaaatatccctttttcacatattaagaatagtctctgggtttacaacaaacactgtgatgttgggaagctatttcctttgcgcaaactttaacaggttttcttctaatcataacatagttgaaaaaagaagtttgggctaacatttaggagaagttggtcttactttgtgcaaaagcaggcttgtgctttataccccatttgatttcgatgtacagtctcaattttgtatttaatgatttttgtgtatccagtatgcacgttaacagcgtgtcaactttcatttgaaagtgggtttcaatttactttttaaacagtgtttatgacgagacctcagatgtgttgacgtaagctctatctgcaatgtttttgtgtagagtggcgattgaatgctgcccagggtcagtgtatctaattccccgagaccctcgtttgatagtgcttcttgtaatatttcttcaagtgagtggcatgtgggttgtgatattgaccatgtgattatggacatcgatatgaaaaataaataaataaaactaaggaaccctggaaactaccagtgggcatgtattagccagtcattgtaacctcgtgtctagtagaacaatgtacaaggtatgtacagttcataaatttgttgtcatgtgtatgagaagtactttgtgctgatcgccttatttatattcatcaaataaaccttgtttctttctgaagtg

SEQ ID NO: 134 - DNA, 1136 bp, Homo sapiens
  misc_feature: Incyte ID No: 982535.2
caattctatgactgaaagtgactaaaaagctggctttatgccattaacactctgtactttgcagccaatcagaactgacgcagtctgggtgctagctgcttcaaaagcaacccacaccacacttttaccatttccatacatcaactgctgagaatatgaaaatgcacagtgacaggttttaggatcctgcttcaggatttccttttcctggtttggtcactagagttggctatttatctgtttctaaacaatagctattttatcgaatagtttagagaccactattaaatattgtgactgatgaaggatctgtgaatttttttatatatgttctaagagttaccattttgataccttttaaaaaccagcagctttctactatattcatgtaaaacagcatgaataaaaccattttttgatacagggttttatttggctttaaactcaggaaccaagttaattatgccagattgaactttgatttttactaccttttcaaagatattttaaaaagtggattactacatatgatttctttggagcttacatttctttacttcacgaattctatgtcactgttacaagtttccattctgatggcttctgggcctttgtacctttgtttttggtgccttattcctagtatgtttctatcaccttaatgaggccgcagatggagtcagaatgtgaaattacaaataatcactggatccatctactgttttccatcaccttccccactgatgctctgggcgagagagtgatgtgtcacttcaactgtgtgtaatatgtcagacacgtcctacaataacaggcgtcatatttgtattatttttagtttactgtagaaaataatgtcaccgccaaaggtgatgagagtcacgttttgtaggatctgttttcttatacttaaagacagacttctgctacggtaattgccagtattcatggcttcctttctgtgtcagaagagaagggatctgctttctcttggctgatttcacatagcattggtaatagacatgcatttctctttctaaaggggagtaactttttaaacccttcctgattttagcctggcaatgtaagtgtccttaatgtgactgttttgataattaaaaaaaggtatataattt

SEQ ID NO: 135 - DNA, 4352 bp, Homo sapiens
  misc_feature: Incyte ID No: 1501794.11
cccatctgggtcagtgtgtactctactgcaggctctgtattgatctccaccagtgtttccgaggcattcagccagaaaatacctatagttctgcccagtttgtgggccaggagataaggtactgaaccataaatgcccattttatcatatatttggtatccatagacatccaggttataaagacggtaagcatctccatcaccagtatttttaagttggtgtgattctgcatgttgtgggatcccataaagatgctcaaatccatgcaaggagaaatccaaaccaatagaagaagggccattagctttgatatccacaaattttccaaatttctcttcccacaggcccagatcttcttgattttcctgagaggtgtccactgatgtctcctcctcattttctttagcagctctttgtttgtgaagaatctgtagatgctcaaagtataattggcccagggaatttatgctaatcacaacctcttcttcagacaccaagtctaccttgaatgggtttgctgtgatatggcacttcaggtctccttttccatctgccaatatcagactgcctgtgtccccagagcatgaaatcagccttacagtgcttggcttgcttgtgaggacatccggaacttcaaatctgggttttagaggagtctcttcgttaattttaagcctgaaaatgtttccttctataccataaatttcagccaggagaggaaccttacttgcttcattgatgatttggaacctggtgctgtcttcatctgttgtgactgaatccaataatgcccgataggtggacttcttggaaagccactgtttctgacgcctgtaaaatgcgatcttgttacagtctctgaaaatgtttttatctacagcttcatcttcaacacttatttcctctttcactgctgcttccatggcttctctgtcactccgaccagctcccagctctcaggacaagggccctgggcgatcttttaaaaaagccgattgggtgtctttctaaaattacaaccagtacttcatcgtcaagtttctgggaagggagtcccctccagattctcatggagtgacaaatcttgactcttgctcctggaatttttcaggcccaaactagcgtttctacaatgatttatttggcaaatttgtcttgattatgggtggctgatgaggaacgtgcttttgttaggaaccgaaactgggcggcggtgagggcgtgtacgcaatgagtccggaagagggtgaaatgctttcggtaggcactccacggctgtgaagatggcggcggctgcgtggcttcaggtgttgcctgtcattcttctgcttctgggagctcacccgtcaccactgtcgtttttcagtgcgggaccggcaaccgtagctgctgccgaccggtccaaatggcacattccgataccgtcggggaaaaattattttagttttggaaagatcctcttcagaaataccactatcttcctgaagtttgatggagaaccttgtgacctgtctttgaatataacctggtatctgaaaagcgctgattgttacaatgaaatctataacttcaaggcagaagaagtagagttgtatttggaaaaacttaaggaaaaaagaggcttgtctgggaaatatcaaacatcatcaaaattgttccagaactgcagtgaactctttaaaacacagaccttttctggagattttatgcatcgactgcctcttttaggagaaaaacaggaggctaaggagaatggaacaaaccttacctttattggagacaaaaccgcaatgcatgaaccattgcaaacttggcaagatgcaccatacatttttattgtacatattggcatttcatcctcaaaggaatcatcaaaagaaaattcactgagtaatctttttaccatgactgttgaagtgaagggtccctatgaatacctcacacttgaagactatcccttgatgatttttttcatggtgatgtgtattgtatatgtcctgtttggtgttctgtggctggcatggtctgcctgctactggagagatctcctgagaattcagttttggattggtgctgtcatcttcctgggaatgcttgagaaagctgtcttctatgcggaatttcagaatatccgatacaaaggagaatctgtccagggtgctttgatccttgcagagctgctttcagcagtgaaacgctcactggctcgaaccctggtcatcatagtcagtctgggatatggcatcgtcaagccacgccttggagtcactcttcataaggttgtagtagcaggagccctctatcttttgttctctggcatggaaggggtcctcagagttactggggcccagactgatcttgcttccttggcctttatccccttggctttcctagacactgcctgtgttattttatggatatttattagcctgactcaaacaatgaagctattaaaacttcggaggaacattgtaaaactctctttgtatcggcatttcaccaacacgcttattttggcagtggcagcatccattgtgtttatcatctggacaaccatgaagttcagaatagtgacatgtcagtcggactggcgggagctgtgggtagacgatgccatctggcgcttgctgttctccatgatcctctttgtcatcatggttctctggcgaccatctgcaaacaaccagaggtttgccttttcaccattgtctgaggaagaggaggaggatgaacaaaaggagcctatgctgaaagaaagctttgaaggaatgaaaatgagaagtaccaaacaagaacccaatggaaatagtaaagttaacaaagcacaggaagatgatttgaagtgggtagaagagaatgttccttcttctgtgacagatgtagcacttccagcccttctggattcagatgaggaacgaatgatcacacactttgaaaggtccaaaatggagtaaggaatgggaagatttgcagttaaagatggctaccatcagggaagagatcagcatctgtgtcagtcttctgtacggctccatgggattaaaggaagcaatgacatcctgatctgttccttgatctttgggcattggagttggcgagaggtgtcagaacaaagagaacatcttactgaaaacaagttcataagatgagaaaaatctacgagcttcttatttacaacactgctgccccctttcctcccagactctgacatggatgttcatgcaacttaagtgtgttgttcctgaactttctgtaatgtttcattttttaaatctgacaaactaaaaagtttaacgtcttctaaaagattgtcatcaacaccataatatgtaatctccaggagcaactgcctgtaatttttatttatttagggagttacataggtgatgggggaaattgttaactacctttcattttcctgggaagtcaaggttacatcttgcagaggttgttttgagaaaaaagggcccttctgagttaaggagccatagttctatcaatgatcaaaagaaaaaaaaaaaaaagagaaactgttacagtatgattcagatcatttaaaaaagcaaaatcaagtgcaattttgtttacaaatggtgtatattaaagatttttctatttcagatgtactttaaagagaaatattagcttaactcttttgacatctgctattgtgacacatcccattgctggcaatgtggtgcacactccgaaacttttaactactgttttgtaagcctccaagggtggcattgcagggtccttaggcaatgttttgtttgcctttatgcagagaggtgctccaagtgctgtgattgagcaccgtgctagaggaactgtaatgcttcagaagttgtagcttatacaaaggaaacaggtcctgctggcttaatttaaacagttattgcatgaagtagcgtggaggccctggactgctgctcgttctttaggatggactgttctggtatctggtattggtttagagactgttaataagggacatcacaaggtgatgggattcatttgaagcactctatttctgttttaatggttttatccaattttgccttcccaagatttttgttctacataaaaagttcatgccactttttaatataaaaaaatttaacaaaattaatgtatttttctcatttttttcaaactttttctaaagactctttctgtcaaactcatgaaaaatttctttctatggcttttattctagattgtcttattttctgttaaaaccaatgaccacatgaccacaatcttcactaactcatactgcagtgaaagtgttaacccttaggtagtttctctacaactctttgctatggtgatttttaaaaaagttt

SEQ ID NO: 136 - DNA, 1200 bp, Homo sapiens
  misc_feature: Incyte ID No: 983910cB1
gtaaagctcccatcctgccctgactctgtcatgggcaccaggctcctctgctgggcagccctgtgcctcctgggggcagatcacacaggtgctggagtctcccagacccccagtaacaaggtcacagagaagggaaaagatgtagagctcaggtgtgatccaatttcaggtcatactgccctttactggtaccgacaaagcctggggcagggcccagagtttctaatttacttccaaggcacgggtgcggcagatgactcagggctgcccaacgatcggttctttgcagtcaggcctgagggatccgtctctactctgaagatccagcgcacagagcagggggactcagccgcgtatctccgtgccggcgttgcggcgggatggagctcctacaatgagcagtattttggcccaggcacccggctgacagtgctagaggacctgaaaaacgtgttcccacccgaggtcgctgtgtttgagccatcagaagcagagatctcccacacccaaaaggccacactggtgtgcctggccacaggcttctaccccgaccacgtggagctgagctggtgggtgaatgggaaggaggtgcacagtggggtcagcacagacccgcagcccctcaaggagcagcccgccctcaatgactccagatactgcctgagcagccgcctgagggtctcggccaccttctggcagaacccccgcaaccacttccgctgtcaagtccagttctacgggctctcggagaatgacgagtggacccaggatagggccaaacctgtcacccagatcgtcagcgccgaggcctggggtagagcagactgtggcttcacctccgagtcttaccagcaaggggtcctgtctgccaccatcctctatgagatcttgctagggaaggccaccttgtatgccgtgctggtcagtgccctcgtgctgatggccatggtcaagagaaaggattccagaggctagctccaaaaccatcccaggtcattcttcatcctcacccaggattctcctgtacctgctcccaatctgtgttcctaaaagtgattctcactctgcttctcatctcctacttacatgaatacttctctcttttttctgtttccctgaagattgagctcccaacccccaagtacgaaataggctaaaccaataaaaaattgtgtgttgggcctggttgcaaaaaaaaaa

SEQ ID NO: 137 - DNA, 1113 bp, Homo sapiens
  misc_feature: Incyte ID No: 999097.1
aaattaccaacggcagacacggagacagcgccggggcggagggtacgatggagaatttcacggcactgtttggggctcaggctgacccaccaccgcccccaaccgcactcggcttcggaccaggaaagcctccacccccgccaccgcctcctgcgggcggggggacccggcacggccccgcctcccaccgtggccacggctcctcctggcgcggacaagtcaggagctggctgtggccctttttacctcatgagggaactgccaggtagcacagagctgacaggcagcacgaatctgatcacacactacaacttggaacaagcctataataaattctgtgggaagaaggtgaaggagaagctaagtaacttcctgcctgacctgccagggatgattgatctgcctggttcccatgataacagcagcctccgctctctcattgagaagccccctattctcagtagctctttcaatcctatcacagggaccatgctggccggcttccgcctccacactggcccgttgccggagcagtgtcgtctgatgcatattcagcctcccaagaagaagaataagcacaagcacaaacagagccgtacccaggatcctgtccccccagaaacaccatctgattcagatcacaagaagaagaaaaagaaaaaagaagaggatcctgaacggaaaaggaagaagaaagagaagaagaaaaagaagaatcgacatagtccagaccacccaggtatgggcagctcccaggccagcagcagcagccagcctacgctaataggaccactggactctttgccaggatggcttttcctgctgtactgaacctgctgataaaagctgccttccaggctcttggacactgccttgggagcatcctgcagctgggacagaggccagctcctgttgggctcagttgagactaagtaaattaggagagagagggacatgcttttgtaggctcatcccagttggttttctcatggacatctcttcctctcccaggaagcttacaattttcttctctctcttttgtgcaatttgtctgatttaggacttgttctgtgttttctttaaaaaaaaaaaaaattacatttatcaaactga

SEQ ID NO: 138 - DNA, 561 bp, Homo sapiens
  misc_feature: Incyte ID No: 293858.32
ctgagccagtcacctgtgttccaggagccgaatcagaaatgtcatcctcaggcacgccagacttacctgtcctactcaccgatttgaagattcaatatactaagatcttcataaacaatgaatggcatgattcagtgagtggcaagaaatttcctgtctttaatcctgcaactgaagagcccttgcattgtgttagctgatgccgacttggacaatgctgttgaatttgcacaccatggggtattctaccaccagggccagtgttgtatagccgcatccaggatttttgtggaagaatcaatttatgatgagtttgttcgaaggagtgttgagcgggctaagaagtatatccttggaaatcctctgaccccaggagtcactcaaggccctcagattgacaaggaacaatatgataaaatacttgacctcattgagagtgggaagaaagaaggggccaaactggaatgtggaggaggcccgtggggggaataaaggctactttgtccagcccacagtgttctctaatgttacagatgagatgcgcattgccaaagaggagat

SEQ ID NO: 139 - DNA, 6868 bp, Homo sapiens
  misc_feature: Incyte ID No: 1269631cB1
ccggcccagcggctctcctggcctcgcgctgcacattctctcctggcggcggcgccacctgcagtagcgttcgcccgaacatggcgacacggagcagcaggagggagtcgcgactcccgttcctattcaccctggtcgcactgctgccgcccggagctctctgcgaagtctggacgcagaggctgcacggcggcagcgcgcccttgccccaggaccggggcttcctcgtggtgcagggcgacccgcgcgagctgcggctgtgggcgcgcggggatgccaggggggcgagccgcgcggacgagaagccgctccggaggaaacggagcgctgccctgcagcccgagcccatcaaggtgtacggacaggttagtctgaatgattcccacaatcagatggtggtgcactgggctggagagaaaagcaacgtgatcgtggccttggcccgagatagcctggcattggcgaggcccaagagcagtgatgtgtacgtgtcttacgactatggaaaatcattcaagaaaatttcagacaagttaaactttggcttgggaaataggagtgaagctgttatcgcccagttctaccacagccctgcggacaacaagcggtacatctttgcagacgcttatgcccagtacctctggatcacgtttgacttctgcaacactcttcaaggcttttccatcccatttcgggcagctgatctcctcctacacagtaaggcctccaaccttctcttgggctttgacaggtcccaccccaacaagcagctgtggaagtcagatgactttggccagacctggatcatgattcaggaacatgtcaagtccttttcttggggaattgatccctatgacaaaccaaataccatctacattgaacgacacgaaccctctggctactccactgtcttccgaagtacagatttcttccagtcccgggaaaaccaggaagtgatccttgaggaagtgagagattttcagcttcgggacaagtacatgtttgctacaaaggtggtgcatctcttgggcagtgaacagcagtcttctgtccagctctgggtctcctttggccggaagcccatgagagcagcccagtttgtcacaagacatcctattaatgaatattacatcgcagatgcctccgaggaccaggtgtttgtgtgtgtcagccacagtaacaaccgcaccaatttatacatctcagaggcagaggggctgaagttctccctgtccttggagaacgtgctctattacagcccaggaggggccggcagtgacaccttggtgaggtattttgcaaatgaaccatttgctgacttccaccgagtggaaggattgcaaggagtctacattgctactctgattaatggttctatgaatgaggagaacatgagatcggtcatcacctttgacaaagggggaacctgggagtttcttcaggctccagccttcacgggatatggagagaaaatcaattgtgagctttcccagggctgttcccttcatctggctcagcgcctcagtcagctcctcaacctccagctccggagaatgcccatcctgtccaaggagtcggctccaggcctcatcatcgccactggctcagtgggaaagaacttggctagcaagacaaacgtgtacatctctagcagtgctggagccaggtggcgagaggcacttcctggacctcactactacacatggggagaccacggcggaatcatcacggccattgcccagggcatggaaaccaacgagctaaaatacagtaccaatgaaggggagacctggaaaacattcatcttctctgagaagccagtgtttgtgtatggcctcctcacagaacctggggagaagagcactgtcttcaccatctttggctcgaacaaagagaatgtccacagctggctgatcctccaggtcaatgccacggatgccttgggagttccctgcacagagaatgactacaagctgtggtcaccatctgatgagcgggggaatgagtgtttgctgggacacaagactgttttcaaacggcggaccccccatgccacatgcttcaatggagaggactttgacaggccggtggtcgtgtccaactgctcctgcacccgggaggactatgagtgtgacttcggtttcaagatgagtgaagatttgtcattagaggtttgtgttccagatccggaattttctggaaagtcatactcccctcctgtgccttgccctgtgggttctacttacaggagaacgagaggctaccggaagatttctggggacacttgtagcggaggagatgttgaagcgcgactggaaggagagctggtcccctgtcccctggcagaagagaacgagttcattctgtatgctgtgaggaaatccatctaccgctatgacctggcctcgggagccaccgagcagttgcctctcaccgggctacgggcagcagtggccctggactttgactatgagcacaactgtttgtattggtccgacctggccttggacgtcatccagcgcctctgtttgaatggaagcacagggcaagaggtgatcatcaattctggcctggagacagtagaagctttggcttttgaacccctcagccagctgctttactgggtagatgcaggcttcaaaaagattgaggtagctaatccagatggcgacttccgactcacaatcgtcaattcctctgtgcttgatcgtcccagggctctggtcctcgtgccccaagagggggtgatgttctggacagactggggagacctgaagcctgggatttatcggagcaatatggatggttctgctgcctatcacctggtgtctgaggatgtgaagtggcccaatggcatctctgtggacgaccagtggatttactggacggatgcctacctggagtgcatagagcggatcacgttcagtggccagcagcgctctgtcattctggacaacctcccgcacccctatgccattgctgtctttaagaatgaaatctactgggatgactggtcacagctcagcatattccgagcttccaaatacagtgggtcccagatggagattctggcaaaccagctcacggggctcatggacatgaagattttctacaaggggaagaacactggaagcaatgcctgtgtgcccaggccatgcagcctgctgtgcctgcccaaggccaacaacagtagaagctgcaggtgtccagaggatgtgtccagcagtgtgcttccatcaggggacctgatgtgtgactgccctcagggctatcagctcaagaacaatacctgtgtcaaagaagagaacacctgtcttcgcaaccagtatcgctgcagcaacgggaactgtatcaacagcatttggtggtgtgactttgacaacgactgtggagacatgagcgatgagagaaactgccctaccaccatctgtgacctggacacccagtttcgttgccaggagtctgggacttgtatcccactgtcctataaatgtgaccttgaggatgactgtggagacaacagtgatgaaagtcattgtgaaatgcaccagtgccggagtgacgagtacaactgcagttccggcatgtgcatccgctcctcctgggtatgtgacggggacaacgactgcagggactggtctgatgaagccaactgtaccgccatctatcacacctgtgaggcctccaacttccagtgccgaaacgggcactgcatcccccagcggtgggcgtgtgacggggatacggactgccaggatggttccgatgaggatccagtcaactgtgagaagaagtgcaatggattccgctgcccaaacggcacttgcatcccatccagcaaacattgtgatggtctgcgtgattgctctgatggctccgatgaacagcactgcgagcccctctgtacgcacttcatggactttgtgtgtaagaaccgccagcagtgcctgttccactccatggtctgtgacggaatcatccagtgccgcgacgggtccgatgaggatgcggcgtttgcaggatgctcccaagatcctgagttccacaaggtatgtgatgagttcggtttccagtgtcagaatggagtgtgcatcagtttgatttggaagtgcgacgggatggatgattgcggcgattattctgatgaagccaactgcgaaaaccccacagaagccccaaactgctcccgctacttccagtttcggtgtgagaatggccactgcatccccaacagatggaaatgtgacagggagaacgactgtggggactggtctgatgagaaggattgtggagattcacatattcttcccttctcgactcctgggccctccacgtgtctgcccaattactaccgctgcagcagtgggacctgcgtgatggacacctgggtgtgcgacgggtaccgagattgtgcagatggctctgacgaggaagcctgccccttgcttgcaaacgtcactgctgcctccactcccacccaacttgggcgatgtgaccgatttgagttcgaatgccaccaaccgaagacgtgtattcccaactggaagcgctgtgacggccaccaagattgccaggatggccgggacgaggccaattgccccacacacagcaccttgacttgcatgagcagggagttccagtgcgaggacggggaggcctgcattgtgctctcggagcgctgcgacggcttcctggactgctcggacgagagcgatgaaaaggcctgcagtgatgagttgactgtgtacaaagtacagaatcttcagtggacagctgacttctctggggatgtgactttgacctggatgaggcccaaaaaaatgccctctgcatcttgtgtatataatgtctactacagggtggttggagagagcatatggaagactctggagacccacagcaataagacaaacactgtattaaaagtcttgaaaccagataccacgtatcaggttaaagtacaggttcagtgtctcagcaaggcacacaacaccaatgactttgtgaccctgaggaccccagagggattgccagatgcccctcgaaatctccagctgtcactccccagggaagcagaaggtgtgattgtaggccactgggctcctcccatccacacccatggcctcatccgtgagtacattgtagaatacagcaggagtggttccaagatgtgggcctcccagagggctgctagtaactttacagaaatcaagaacttattggtcaacactctatacaccgtcagagtggctgcggtgactagtcgtggaataggaaactggagcgattctaaatccattaccaccataaaaggaaaagtgatcccaccaccagatatccacattgacagctatggtgaaaattatctaagcttcaccctgaccatggagagtgatatcaaggtgaatggctatgtggtgaaccttttctgggcatttgacacccacaagcaagagaggagaactttgaacttccgaggaagcatattgtcacacaaagttggcaatctgacagctcatacatcctatgagatttctgcctgggccaagactgacttgggggatagccctctggcatttgagcatgttatgaccagaggggttcgcccacctgcacctagcctcaaggccaaagccatcaaccagactgcagtggaatgtacctggaccggcccccggaatgtggtttatggtattttctatgccacgtcctttcttgacctctatcgcaacccgaagagcttgactacttcactccacaacaaaacggtcattgtcagtaaggatgagcagtatttgtttctggtccgtgtagtggtaccctaccaggggccatcctctgactacgttgtagtgaagatgatcccggacagcaggcttccaccccgtcacctgcatgtggttcatacgggcaaaacctccgtggtcatcaagtgggaatcaccgtatgactctcctgaccaggacttgttgtatgcaattgcagtcaaagatctcataagaaagactgacaggagctacaaagtaaaatcccgtaacagcactgtggaatacacccttaacaagttggagcctggcgggaaataccacatcattgtccaactggggaacatgagcaaagattccagcataaaaattaccacagtttcattatcagcacctgatgccttaaaaatcataacagaaaatgatcatgttcttctgttttggaaaagcctggctttaaaggaaaagcattttaatgaaagcaggggctatgagatacacatgtttgatagtgccatgaatatcacagcttaccttgggaatactactgacaatttctttaaaatttccaacctgaagatgggtcataattacacgttcaccgtccaagcaagatgcctttttggcaaccagatctgtggggagcctgccatcctgctgtacgatgagctggggtctggtgcagatgcatctgcaacgcaggctgccagatctacggatgttgctgctgtggtggtgcccatcttattcctgatactgctgagcctgggggtggggtttgccatcctgtacacgaagcaccggaggctgcagagcagcttcaccgccttcgccaacagccactacagctccaggctggggtccgcaatcttctcctctggggatgacctgggggaagatgatgaagatgcccctatgataactggattttcagatgacgtccccatggtgatagcctgaaagagctttcctcactagaaaccaaatggtgtaaatattttatttgataaagatagttgatggtttattttaaaagatgcactttgagttgcaatatgttatttttatatgggccaaaaacaaaaaacaaaaaaaaaaaaaaa

SEQ ID NO: 140 - DNA, 2433 bp, Homo sapiens
  misc_feature: Incyte ID No: 337208.11
aggctttgtagggaacactgttatcgcccgccccctcggagctttttctccagttaactgtcggagtagcgggggctccggcgccgggcgacatgcccggtgcgcttcaaggggctgagtgaataccagaggaacttcctgtggaaaaagtcttatttgtcagagtcttgtaattcctccgtggggcgaaagtacccatgggctggacttagatcagatcaattaggttttccacaataaaagccagtttgttccaccattcaaaggtaactcagtcatccatgaaactgaatacaaaagaaatttcaagggtttatctccagtgaaagaaccaaaattaagaaatgatttgagagaaaacagaaatcttgaaacagtgtctcctgaaaggaagagtaataaaatagacgatcgtttaaaattggaagcagagatggaattaaaagacttacaccagcctaaaaggaagcttactccttggaaacatcaaaggcttgggaaggtgaattccgaatatagagcaaaatttctgagcccagctcagtatttatataaagctggggcttggacacatgtaaagggaaacatgccaaatcaggttaaagaactccgagaaaaggctgagttttataggaagcgagttcaggggacgcatttttctcgggaccatctgaatcagattttatctgatagcaactgctgttgggatgtctcctcaaccacaagctcagaaggaaccattagtagcaacatcagagcattagatcttgctggagatcctacaagccataagactttgcagaaatgtccttctacagaaccagaagaaaaaggaaatatcgtggaagaacagccccagaaaaataccacggagaaattgggtgtgtcagctcccacccatacccgttagaaggcggctggcttgggatacagagaacacaagtgaagacgtacagaaacagcccggggagaaagaggaggaggacgacaatgaagaggaaggggacaggaaaacgggcaagcaggcttttatgggagagcaagagaagttggatgtacatgagaaatctaaggcagataagatgaaagaagggtcagattcttctgtatcctcagaaaaaggaggccggcttcctactcccaagctgagagaacttggtggaatccagaggactcatcatgatctcactactccagctgttggtggtgctgttttagtgtctccatctaagatgaagcctccagccctagaacagaggaaaagaatgacctctcaggattgtttagaaacttcaaagaatgattttactaagaaagaaagtcgtgctgtatccctactgacttctccagctgctggtataaaaacagttgatcctctgcctttgcgggaagattctgaagacaatatccacaaatttgctgaggcaactcttccagtttcaaaaattccaaaatacccaacaaatccccctggacagttgccttctccaccacatgttccatcctactggcatccctctcgacgaattcagggctctcttagagatccagagtttcagcacaatgtgggaaaagcaaggatgaacaatttgcagttacctcaacatgaagcctttaatgatgaagatgaggacagattgtctgagatttctgctcgctctgcagcttctagtctccgggcttttcaaactctggcacgagctaagaaaaggaaggagaatttctggggtaaaacataaacctagctgagttgcctttatctaaggaaacattggcataatttttctttattgcttactgtgttaaaattttttgagtgaagtttttcctaacgttttctactttgaaatatttaatttccaatagaacagtttacttggaaattgttaacataggcttatacaaatttaacttttaaagaattctttttacatctatcccagagtacaaagacctagattattgaattcttcacatgtaactttcgtaataggtgtcatggatagattttcacctatccagagagtattctaaaaaaataaacaaagtgaagtaaaagttaagatcccagtgtgaagtatatattcccctaagatttgatatatgtatctttataattgatgatgttgtaaaatgaatttgttgttcctttaacctttgctgtagtgtttctttttattttagttccttctatacatgtttgcagtgttaagataattgtactttgaaaacaccagctgtatatatttttcttatttatgtaacaaagtttgctgaaagatatgtatatttttgatctttgagtgtattctatttgtgtaaggactttggcttacatttgaataatgtctagattttgaaaaattacctgtataatggagaattaaaactttgtagacattttgaaataaaaatggatcaagtgcgaaaaaa

SEQ ID NO: 141 - DNA, 2137 bp, Homo sapiens
  misc_feature: Incyte ID No: 337800.3
ttttttaagtgttagatgtttttgatattttaaaaaagcatctaggctgcttgtggaagtcagaccaaaatagcaggaaggtattgcagcaagatggatttgggaaaggaccaatctcatttgaagcaccatcagacacctgaccctcatcaagaagagaaccattctccagaagtcattggaacctggagtttgagaaacagagaactacttagaaaaagaaaagctgaagtgcatgaaaaggaaacatcacaatggctatttggagaacagaaaaaacgcaagcagcagagaacaggaaaaggaaatcgaagaggcagaaagagacaacaaaacacagaattgaaggtggagcctcagccacagatagaaaaggaaatagtggagaaagcactggcacctatagagaaaaaaactgagccacctgggagcataaccaaagtatttccttcagtagcctccccgcaaaaagttgtgcctgaggaacacttttctgaaatatgtcaagaaagtaacatatatcaggagaatttttctgagtaccaagaaatagcagtacaaaaccattcttctgaaacatgccaacatgtgtctgaacctgaagacctctctcctaaaatgtaccaagaaatatctgtacttcaagacaattcttccaaaatatgccaagacatgaaggaacctgaagacaactctcctaacacatgccaagtaatatctgtaattcaagaccatcctttcaaaatgtaccaagatatggctaaacgagaagatctggctcctaaaatgtgccaagaagctgctgtacccaaaatccttccttgtccaacatctgaagacacagctgatctggcaggatgctctcttcaagcatatccaaaaccagatgtgcctaaaggctatattcttgacacagaccaaaatccagcagaaccagaggaatacaatgaaacagatcaaggaatagctgagacagaaggcctttttcctaaaatacaagaaatagctgagcctaaagacctttctacaaaaacacaccaagaatcagctgaacctaaataccttcctcataaaacatgtaacgaaattattgtgcctaaagccccctctcataaaacaatccaagaaacacctcattctgaagactattcaattgaaataaaccaagaaactcctgggtctgaaaaatattcacctgaaacgtatcaagaaatacctgggcttgaagaatattcacctgaaatataccaagaaacatcccagcttgaagaatattcacctgaaatataccaagaaacaccggggcctgaagacctctctactgagacatataaaaataaggatgtgcctaaagaatgctttccagaaccacaccaagaaacaggtgggccccaaggccaggatcctaaagcacaccaggaagatgctaaagatgcttatacttttcctcaagaaatgaaagaaaaacccaaagaagagccaggaataccagcaattctgaatgagagtcatccagaaaatgatgtctatagttatgttttgttttaacaatgctcaaccataaagttgtggtccaatggaacatacagcttaatagtttatgcgtgattttctcaaaatattgtaaaacttttgacaatgctcattaatattattttttctatttgtagaccatatctgaaagaaataacattttttaaggctctaccacatagacaatatcatgctagaatgtgtgtgtgtgtgtgtgtgtgtgtgtgtatgtatgtataggtcggggagaggatagtggtgggaacagacaaataaggaagcggggaggactggataattggttttcccccctaagaacatttatttacgtcttaagagcagataagtgactaagactgaacacatacattttgtggagtatatagttttcttgtaaatgctgttcaattattaatgtaacagtagcatcaaaattttattcaggctttagttgactcttttggtcagttttaacaattctccttaaaagatattttggagtgatgaatgtagtttacttttgtatttgaattttgattttctatttttattttttaaatattgtatttgtgcacaatgtacattaaatcattattacatgctt

SEQ ID NO: 142 - DNA, 3721 bp, Homo sapiens
  misc_feature: Incyte ID No: 1361343cB1
tgagaatccagtgagtgtgacgtttctccagatacttcatgctgttcacctgtgtcctcgccgcaccactgccgcacacgactcctgaaccatgggggaaaacgaggatgagaagcaggcccaggcggggcaggtttttgagaactttgtccaggcatccacgtgcaaaggtaccctccaggccttcaacattctcacacgacacctggacctagaccctctggaccacagaaacttttattccaagctcaagtccaaggtgaccacctggaaagccaaagccctgtggtacaaattggataagcgtggttcccacaaagagtataagcgagggaagtcgtgcacgaacaccaagtgtctcatagttgggggaggaccctgtggcttgcgcactgccattgaacttgcctacctgggagccaaagtggtcgtggtggagaagagggactccttctcccggaacaacgtgctccacctctggcctttcaccatccatgaccttcggggcctgggagccaagaagttctatgggaagttctgtgctggctccatcgaccatatcagtattcgccaactacagctcatcctattcaaggtggccctgatgctgggagttgaaatccatgtgaatgtggagttcgtgaaggttctagagcctcctgaagatcaagaaaaaaaaaaaattggctggcgggcagaatttctccctacagaccattctctgtcggagtttgagtttgacgtcatcattggtgccgatggccgcaggaacaccctggaagggttcagaagaaaagaattccgtgggaagctggcgattgccatcaccgccaacttcataaacagaaacagcacagcggaagccaaggtggaagagattagtggtgtggctttcatcttcaatcagaaattttttcaggaccttaaagaagaaacaggcatagatcttgagaacattgtttactacaaggactgcacccactattttgtaatgacagccaagaagcagagcctgctcgacaaaggtgtcatcattaacgactacatcgacacagagatgctgctgtgtgcggagaacgtgaaccaagacaacctgctatcctatgcccgggaagctgcagactttgccaccaactaccagctgccatccttagactttgccatgaaccactatgggcagcctgatgtggccatgtttgactttacctgcatgtatgcctcagagaacgcggccctggtgcgggagcggcaggcgcaccagctgctcgtggcccttgtgggtgacagcttgcttgagccattttggcccatgggtacaggctgtgcccgtggcttcctggcagcctttgacacggcatggatggtgaagagctggaaccagggcacccctcccctggagctgctggctgaaagggaaagtctctaccggctgttacctcagacaaccccggagaacatcaacaagaactttgagcagtacacgttggacccagggacacggtacccaaacctcaactcacactgtgtcaggccccatcaggtgaagcatttgtatatcactaaggagctggagcactaccctctcgagagactgggctcggtgaggagatctgtcaacctctccaggaaggagtcagatatccggcccagcaagctcctgacctggtgccagcagcagacagagggctaccagcatgtcaacgtcaccgacctgaccacatcctggcgcagtgggttggccctgtgtgccatcatccaccgcttccggcctgagctcatcaactttgactctttgaatgaagatgatgctgtggagaacaaccagctcgcatttgatgtggccgagcgagagtttgggatccctccagtgaccacgggcaaagagatggcatctgcccaggagcctgacaagctcagcatggtcatgtacctctccaagttctacgagctcttccggggcaccccactgaggcccgtggattcttggcgcaaaaactatggagaaaatgctgacctcagcttggccaaatcatccatttctaataactatctcaacctcacatttccaaggaagaggactccacgggtggatggtcaaaccggagagaatgacatgaacaaacggagacggaagggcttcaccaacctggacgagccttcaaacttttccagccgtagcttgggctccaatcaagagtgtgggagcagtaaggaaggtggaaatcagaacaaagtcaagtccatggcgaatcagctgctggccaagtttgaggagagcactcggaacccctcactcatgaagcaggaacgccgtgtctcagggataggtaagccggtcctgtgctcttcctccggccctcctgttcactcttgctgccccaagccggaggaggccacacccagcccatcacctcctctgaaaaggcagttcccctctgtggtcgtgacggggcacgtgctcagagagctcaagcaagtgtctgctggcagtgagtgcctgagcagaccttggagagccagagccaagtctgacctacagctgggtgggacagaaaatttcgctaccctgccttctacccgcccgagggcgcaggctctttccggggtgctgtggcggctgcagcaagtggaggaaaagattctccagaagagggctcagaacttggccaacagggaatttcacacaaagaacattaaggagaaggcggctcaccttgcctccatgtttggacacggggatttcccgcagaataaactgctctctaaaggcctgtctcatactcatcctccatctcctccctctcgccttccgtctcctgatccagctgcttcttcctctccatcaactgttgactctgcttctcctgccagaaaggaaaagaagtcaccttcagggttccattttcatcccagccatttgagaacagtgcatcctcagctgacggtagggaaagtgtccagcggaataggggctgcagctgaagtcctggtcaatctgtacatgaatgatcacagacctaaggcccaggccacctctccagacctggaatctatgcgaaagtcatttccccttaacctgggaggcagcgacacgtgttacttctgtaagaaacgtgtgtacgtgatggaacggctgagcgccgagggccacttcttccaccgggagtgtttccgctgcagcatctgtgccaccaccttgcgcctggccgcctacacctttgactgcgatgaaggcaaattttactgcaagcctcacttcattcactgtaaaaccaatagcaaacaacggaagagacgggcagagttgaagcaacaaagagaggaggaggcaacatggcaagagcaggaagcccctcggagagacactcccaccgaaagttcttgcgcagtggccgccattggcaccctggaaggcagccccccagttcatttcagccttccagtgctacacccacttcttggctgacacacttctgctctaagagtctccctccctttatagaatgtcaaccaaagagtgccctcctcccctctcagcctcctctttagctagcctccccatctcatcacaacgcatgtctgtgacctttggtaatcatttacagtgccacacggaaccctgtattttgcacacagcaaaacaaacaatgtttagctttatttatggtatttgatgctgtaaatggaaataaatattgttctttataaaaaaaaaaaaaaa

SEQ ID NO: 143 - DNA, 449 bp, Homo sapiens
  misc_feature: Incyte ID No: 1504867.1
atgctcccaaagtgccttgttttctctgatacaaacatatttataaggacatattcctgtgggttcttgggtgtgtttgccacatcaagattttagggaaggggggtatatgtgtagtagggatgccgtttgaaaacaggcactcttcccctgaggatgggaaaggagctcttcagttggagatctaggcagtgggttaagccagacccctaaagtgaccctttcctcttctgccctattcttctcagaccctcagaaagacatccaatttttttaaatccctgtagctccaagcctggtctcatttgcttccctgccaggctcatcgtgtgtataccacatttgtgccccactgacctgaaggttccatgtaactgtatacacatgaatacttaaatgccaacatttaaaataatttgataaagtctttgtagccactcagccaaaaa

SEQ ID NO: 144 - DNA, 6952 bp, Homo sapiens
  misc_feature: Incyte ID No: 410917.13
tttacaattcaactcaggcagcttttattagagtattatataccaagtatatgatgaggagtccaaatgcaaactggatattcaaggaacttaggatttcctgggttaagcctattagcctaattaattttattccatttatacttacttttcacatgtccatcagtagctcccaaactttgctgcacaagttccaactgggaaatctaaaaatcatgatgcctggactgcaccccatgccaattaagtcattctctatggggcgggacccagacatccatgttttgttttaactttttaggtgattccaatacgtagccaagtttgaggaacaatgctgtagaccttactactcaaaatgtaattagaacagccacagcatcctcacctaggaggagcttgtttaaagtgcagaaatctcaggccccttctgtgtatgaacacagccctgatttataaaaacaagttaactgatgaagcaaataatcttttctatgaactgatgaagcaaataatcttttctatgattaactgtctgagtaaccgcttaatgtgagttcttttaattatgtggcaagtgatagaagttatgtactttcaggtgggagaaatggcctgctttgctagaatatcctaaaatatctgaaagggacaaatgtgtctactgataggtcaggacttcagtgctgactttctgaaattcttgagtaaagatcattcccttccttgttcttccttaatagatcaaacaaaaattaattaattaataataaaaacagaattaagtaaaacaaaagatttttaaaaattaatacgtgagatacactgcagtatatatgtatgtctgattacgcatagaaaaaagatctggaagtttacatatcaaattataagttataagtttaccttgagggtgtggaactgtggtagggtgaggggactgctctcatttttaaattcacatacttttgtaattttttttttgaaatttacagtgagaattcattatttttataataatcaaaccataatagaaattttaaagatgataaaaaacaaaaagtaaaacacacacacatacataataattttaagagttacattggaggaatggagaattaaatcacatggtacttttccactaatactgtgatggtacataattgtgtagtcggtaatcaaagaaactacattagagaagccacattaagtaacatccgaattaaaaagtcccctgggataagagccctcaagcagcgacccctcaaggtggatattaaaactgaaagcagtgcttaactcttcctggagtatctacatgaaaaaaacaacattctgaaaatttcacattaaaaaaaaagcttcatagaagtcactttgaaatgctaaaatagccaaaggccagaaattgagggtataaaaactccattcagaacagattcaaaactagtacactgaaaccttggtaatctatgggtgtaggttagggacatcttctttttccatttgtttatcatttctcccaatttcccaatggctgctttatatctcaataattttaacctaaaaatattgtaattttagttggaaggaataaaattaattgcatctagattcattgcagattttagttagttaaaaaaaaagaacaatttgagactcactattttccattattcatttttttccacataattatttctagctacttaataaacatttggggattgaatccctgaagttacatatttaaaatttgaggaaatcctttttctcctcttctagttttttctttattgaagtcactagagatgacaaacttttttattataaacttttttccaacaaaaaagatattttaggtgactattagattgatagctaaatatcctcatcaaagtcaaaacatctgtaactaaaaagtgctgtcttttgcaagctacacaattaagagcttaactatcaataatgtaattttgtactcctggaagagtattcctgatctaggtatcaaaggtttacgtaggaatatatttactatataatatgagaaattcaaagagcagagataaaaagcacagatctaatggccataccatttttagaagttacaatagctagaatattgctatttctcaatggattatagtattttaattaaaaagaaaaaaagaaagaaaaccgcacaagattcatcataatgcatataaagtatttagcacaatgcttggtacacaataactattcaataaatattagctctataataaacaagggattaaaataataaaaaaaaaacaaacaggagaacccaaaatgaagggaaaaacttagagctaatttcctagagtatgtatttaaatggaaagtcggagctcacagagagcagtcaggaattctgcattttctggatctatcttttgtgccttctcatagtactcagcagcttgcctcttttctccttccagcttgtaaacaaaccctagggcacttaaactctgcacatctaaagcattgtgacaaagtctcttggtagacaatttcttcagagcacttgtcagtttggtgcgaaggggtgatctgtctttgacctttaaggcttctaaataatgatggatggcagtattttctgatttacggtgaaattcctgaaagcggccatagtggtaatggatctgatgtttgtgatcatcggttatgttctccagacgaagagctttccggaaaatgtcctcagcattgctatactggcctccttcagcatacatgttggccaggtctgtgtaggcaaatgcaaacatagagtctcgttccatggctgctttgaaatgaaatatagcagatgaaatcagctcatcaacctttagtttatcctttcctttaggtctgttgtgtgtggccttcttgatttggatcatttgtgccctgtagcaaagtcccatctggtgatgcaggaaagaagaagttggtgtcacctccaaggccttttttaaaagttcgagagctttgttccaggaattttttctcctatagaacttggctgcataacgaaggacgtaaggctgggatgatatttggtccaggatttcttcaatatacttttccccttcagcttctgcatgtacatcttgaagcttcagtgccagaaaaaccttaatatagctgttatctgggttcagggtaacagcctttctcaaaggccccagagaaaagctctttacagacccttctctatcagaatcatccagccgatacactgtgatagcatagccgatgttaaattctggattgtcaggctccacttccagagccttctcaaaagccgctttagccttttgataatactttcctccaaatttcaagagtgcccagcctttctcacagtcagtctcaggacactccaacttgtagttagaaggactggacaatttcttacagacattccctatcttacctgtatacttctgagcttcttcaagctggtccatgtgataatacacccaggcatagtttccccaagtgaccaggcttcgtacttcttctttgtctgagtgttcttgctggattatttcttctgcttgttccaagcactcaagggcgtctttattttggccttttaggtgtttcacataggccaataggttataaagagcaagtctagattttgtggtaagaaattcaagctgttgcccaattgtatcttctacctcaaacagatcaatgtcttccttaagtaaattccatgtaaaatgacattctaactccaacagaatggccttcaaggtgtccttacgaatttcactcatgatggcagcgctctgcaggccgtccgggcggcgcagtccctcggatcgctctctcctcagcaccggggagcgggggaagccgcgcggtgggcgtgcgcgtgcgcgtgcgcgcgccaggcctctgcagcccctggactcggccgcgcggcgtgtctttgttaaaggagagaccccagccccagcaagaacaggaaactggagattgaatcagatgccgagcgctcagaaactgaaacttaagaaatcgaaactaaacgtaagcttcagaaaccgaaacttaatagaagagctcaagagccgcggccagacgtttgcggagtccagggtctttcggagttgaatttgcagctgggctccttcactttggtctcggcttttatctgcctccctgataggtttttggtcttggtgacttcaagaatgaagctgcggactctcgctgtgagtgctacagttgttaaagatggcgtgtctggagtttgttcctttcgatgttcagatgtgtctggagtttcttccttctggtgagttcgtggtcttgctgacttcaggagtgcagctgcagaccttcacaagtctcgctctgtagccaggctggagtgcagtggcacaatctcggctcactgcaaccttcacctcctgggttcaagaaattcacctgcctcagcctcccgaatagttgggactgcagaatgaaaatgcggttcttggggttggtggtctgtttggttctctggaccctgcattctgaggggtctggagggaaactgacagctgtggatcctgaaacaaacatgaatgtgagtgaaattatctcttactggggattccctagtgaggaatacctagttgagacagaagatggatatattctgtgccttaaccgaattcctcatgggaggaagaaccattctgacaaaggtcccaaaccagttgtcttcctgcaacatggcttgctggcagattctagtaactgggtcacaaaccttgccaacagcagcctgggcttcattcttgctgatgctggttttgacgtgtggatgggcaacagcagaggaaatacctggtctcggaaacataagacactctcagtttctcaggatgaattctgggctttcagttatgatgagatggcaaaatatgacctaccagcttccattaacttcattctgaataaaactggccaagaacaagtgtattatgtgggtcattctcaaggcaccactataggttttatagcattttcacagatccctgagctggctaaaaggattaaaatgttttttgccctgggtcctgtggcttccgtcgccttctgtactagccctatggccaaattaggacgattaccagatcatctcattaaggacttatttggagacaaagaatttcttccccagagtgcgtttttgaagtggctgggtacccacgtttgcactcatgtcatactgaaggagctctgtggaaatctctgttttcttctgtgtggatttaatgagagaaatttaaatatgtctagagtggatgtatatacaacacattctcctgctggaacttctgtgcaaaacatgttacactggagccaggctgttaaattccaaaagtttcaagcctttgactggggaagcagtgccaagaattattttcattacaaccagagttatcctcccacatacaatgtgaaggacatgcttgtgccgactgcagtctggagcgggggtcacgactggcttgcagatgtctacgacgtcaatatcttactgactcagatcaccaacttggtgttccatgagagcattccggaatgggagcatcttgacttcatttggggcctggatgccccttggaggctttataataaaattattaatctaatgaggaaatatcagtgaaagctggacttgagctgtgtaccaccaagtcaatgattatgtcatgtgaaaatgtgtttgcttcatttctgtaaaacacttgtttttctttcccaggtcttttgtttttttatatccaagaaaatgataactttgaagatgcccagttcactctagtttcaattagaaacatactagctattttttctttaattagggctggaataggaagccagtgtctcaaccatagtattgtctctttaagtcttttaaatatcactgatgtgtaaaaaggtcattatatccattctgtttttaaaatttaaaatatattgactttttgcccttcataggacaaagtaatatatgtgttggaattttaaaattgtgttgtcattggtaaatctgtcactgacttaagcgaggtataaaagtacgcagttttcatgtccttgccttaaagagctctctagtctaacggtcttgtagttagagatctaaatgacattttatcatgttttcctgcagcaggtgcatagtcaaatccagaaatatcacagctgtgccagtaataaggatgctaacaattaattttatcaaacctaactgtgacagctgtgatttgacacgttttaattgctcaggttaaatgaaatagttttccggcgtcttcaaaaacaaattgcactgataaaacaaaaacaaaagtatgttttaaatgctttgaagactgatacactcaaccatctatattcatgagctctcaatttcatggcaggccatagttctacttatctgagaagcaaatccctgtggagactataccactattttttctgagattaatgtactcttggagcccgctactgtcgttattgatcacatctgtgtgaagccaaagccccgtggttgcccatgagaagtgtccttgttcattttcacccaaatgaagtgtgaacgtgatgttttcggatgcaaactcagctcagggattcattttgtgtcttagttttatatgcatccttatttttaatacacctgcttcacgtccctatgttgggaagtccatatttgtctgcttttcttgcagcatcatttccttacaatactgtccggtggacaaaatgacaattgatatgtttttctgatataattactttagctgcactaacagtacaatgcttgttaatggttaatataggcagggcgaatactactttgtaacttttaaagtcttaaacttttcaataaaattgagtgagacttataggccca

SEQ ID NO: 145 - DNA, 985 bp, Homo sapiens
  misc_feature: Incyte ID No: 2080904cB1
ccgagtgaccgggccgacagcagcccggaggttggctatgtgaccaggcaacatgctgagccggcttcaggaactgcgcaaggaggaggagacgctgctgcggttgaaggcagccctgcacgaccagctgaaccgcctcaaggttgaagaattagccctccaatcaatgatcagttctagaagaggggatgagatgctgtcttctcacactgtacctgaacagtcacatgatatgttggtgcatgtagacaatgaagcatcaatcaaccaaacaaccctggagctgagcacaaagagtcatgtgacggaagaggaggaggaggaagaggaagaagaatcagattcctaaaggagggggaaagccaggctggtcagttatacaaattgcatttctaaggctcaggctacttctcctcaaggaaatcatcttgccctgggccctgtgatctgcttgaaaggaaagcaagaactataaggaggatgtgtagttgcaaaaatggctccatcggtaactcaagcttcagaatgttatgacatacagaaaatcaaagatgctgtgtcttagcattgagtaatatgggtggtgctgtctgtaatctggtcagattcagttaactgttcagaacaaaatttcctctgaaatactgttgagaaagtctgtcatttgcaaaaagagcagagtttaaatacaagccagtctttccagtcaacaatgcctctttgaagaaaaccaattaaagactgtttgcatgccgctgaacccttgtgagcagttaggacacagtctaggacagaaagatgacaaggggaaggactgagggccatctgagagcacaagctgtttctacctctcagaggcattgaaatattgcatgctataaactgctttgtgtatctgttaccacctctcacttgagacatcactcactggtaaaatgttttataaataaattataagtagccatcatggaaaaaaaaaaaaaaa

SEQ ID NO: 146 - DNA, 1613 bp, Homo sapiens
  misc_feature: Incyte ID No: 2520680cB1
tgggtggtggcggggacgcatcggctccctcccggtaagcgagcgtatctcccgagccgttgccactgacagccgcgggcgctcccatctgagtaagagccagcccgtccgcggcctctccagccccgggttcgcgctctcgactctcctgcctgcccagctgcgcggcggagcggagcatggcgcggcctgcgagtccccggcagcccccgacccctccctcggcgctgcgtgtaggccgcgccctcaggcccagtccgcggtgccccggcgggtgatgccaaatacagccatgaagaaaaaggtgctgctgatggggaagagcgggtcggggaagaccagcatgaggtcgataatcttcgccaattacattgctcgcgacacccggcgcctgggggccaccattgacgtggaacactcccacgtccgattcctagggaacctggtgctgaacctgtgggactgtggcggtcaggacaccttcatggaaaattacttcaccagccagcgagacaatatcttccgtaacgtggaagttttgatttacgtgtttgacgtggagagccgcgaactggaaaaggacatgcattattaccagtcgtgtctggaggccatcctccagaactctcctgacgccaaaatcttctgcctggtgcacaaaatggatctggttcaggaggatcagcgtgacctgatttttaaagagcgagaggaagacctgaggcgtctgtctcgcccgctggagtgtgcttgttttcgaacgtccatctgggatgagacgctctacaaagcctggtccagcatcgtctaccagctgattcccaacgttcagcagctggagatgaacctcaggaattttgcccaaatcattgaggccgatgaagttctgctgttcgaaagagctacattcttggttatttcccactaccagtgcaaagagcagcgcgacgtccaccggtttgagaagatcagcaacatcatcaaacagttcaagctgagctgcagtaaattggccgcttccttccagagcatggaagttaggaattccaacttcgctgctttcatcgacatcttcacctcaaatacgtacgtgatggtggtcatgtcagatccgtcgatcccttctgcggccactctgatcaacattcgcaatgcccggaaacactttgagaagctggagagagtggatggccccaagcacagtctccttatgcgttgaatattgccaaatgctctttctgaaaatgctgaattgccttttttgtttgcatcctttatttttaatattcataatgtcgtgtgcttaaaagtgggctttgaagtgtgtgctgcttactcctttcatctttctccccgcttccccagtctttaaacattggacgctatttactcagctacccagtagagcttgaagctgacctttctgagaagttggtatggtgtaacactaaagtaggtggttcgtgtgtgttctcattacctggttatgatagatatgcacatcaaagcctttaccagtatcttcctgtattccgtatcagattgcaaagacggaatgttactattttatcagcaaggtattaaaatgcatttataaattcaaaaaaaaaaaa

SEQ ID NO: 147 - DNA, 1225 bp, Homo sapiens
  misc_feature: Incyte ID No: 1274560.12
ctcacagagggcctggtctagaatattccacatctgctctcactctgccatggactcctggaccttctgctgtgtgtccctttgcatcctggtagcgaagcatacagatgctggagttatccagtcaccccgccatgaggtgacagagatgggacaagaagtgactctgagatgtaaaccaatttcaggccacaactcccttttctggtacagacagaccatgatgcggggactggagttgctcatttactttaacaacaacgttccgatagatgattcagggatgcccgaggatcgattctcagctaagatgcctaatgcatcattctccactctgaagatccagccctcagaacccagggactcagctgtgtacttctgtgccagcagtttctcgacctgttcggctaactatggctacaccttcggttcggggaccaggttaaccgttgtagaggacctgaacaaggtgttcccacccgaggtcgctgtgtttgagccatcagaagcagagatctcccacacccaaaaggccacactggtgtgcctggccacaggcttcttccccgaccacgtggagctgagctggtgggtgaatgggaaggaggtgcacagtggggtcagcacagacccgcagcccctcaaggagcagcccgccctcaatgactccagatactgcctgagcagccgcctgagggtctcggccaccttctggcagaacccccgcaaccacttccgctgtcaagtccagttctacgggctctcggagaatgacgagtggacccaggatagggccaaacccgtcacccagatcgtcagcgccgaggcctggggtagagcagactgtggctttacctcggtgtcctaccagcaaggggtcctgtctgccaccatcctctatgagatcctgctagggaaggccaccctgtatgctgtgctggtcagcgcccttgtgttgatggccatggtcaagagaaaggatttctgaaggcagccctggaagtggagttaggagcttctaacccgtcatggtttcaatacacattcttcttttgccagcgcttctgaagagctgctctcacctctctgcatcccaatagatatccccctatgtgcatgcacacctgcacactcacggctgaaatctccctaacccagggggaccttagcatgcctaagtgactaaaccaataaaaatgttctggtctggcctgactctgaaaaa

SEQ ID NO: 148 - DNA, 2144 bp, Homo sapiens
  misc_feature: Incyte ID No: 313149.1
ggaagtctggagaaggcattgtttcaattattaaaagtgtgggggcagtgggcggaacaaacgcgccgactacagaggctggacgtaagcttagcggtggcgcgcgtgcgcagcgccggcccgagttgccaaaacaaaggggatttggtgatggaggctttgttagaaggaatacaaaatcgagggcatggtgggggatttttgacatcttgcgaagcagaactacaggagctcatgaaacagattgacataatggtggctcataaaaaatctgaatgggaaggacgtacacatgctctagaaacttgcttgaaaatccgtgaacaggaacttaagagtcttaggagtcagttggatgtgacacataaggaggttggaatgttgcatcagcaggtagaagaacatgaaaaaatcaagcaagagatgaccatggaatataagcaggagttgaagaaactacatgaagaattatgcatactgaagagaagctatgaaaagcttcagaaaaagcaaatgagggaattcagaggaaataccaaaaatcacagggaagatcggtctgaaattgagaggttaactgcaaaaatagaggaattccgtcagaaatcgctggactgggagaagcaacgcttgatttatcagcaacaggtatcttcactggaggcacaaaggaaggctctggctgaacaatcagagataattcaggctcagcttgtcaatcggaaacagaaattagagtctgtggaactttctagccaatcagaaattcaacacttaagcagtaaactggagcgggctaatgacactatctgtgccaatgagttggaaatagagcgcctcaccatgagggtcaatgacttggttggaaccagtatgactgtcctacaggagcagcagcaaaaagaagaaaaattgagggaatctgaaaaactattagaggctctgcaggaagaaaagagagaattgaaggcagctcttcagtctcaagaaaatctcatacatgaggccagaatacaaaaggagaagttacaagaaaaagtaaaggcaactaacactcaacatgctgtagaagctataaggccacgggaagaatctctggcagaaaagaagtacacctctcaagggcagggggacttagacagtgtgctctcccagttgaattttacccatactagtgaggaccttctgcaggcagaggtgacttgtcttgaaggcagtttggaatctgtgagtgcaacgtgtaaacagctgagccaagaactaatggaaaaatatgaagaactgaagaggatggaagcacataacaatgaatacaaagcagagattaagaagttgaaagaacagattttacagggtgaacaaagttacagttctgcactagaaggaatgaagatggaaatctcccatctaactcaggagttacatcagcgagatatcactattgcttccaccaaaggttcttcctcagacatggaaaagcgactcagagcagagatgcaaaaggcagaagacaaagcagtagagcataaggagattttggatcagctggagtcactcaaattagaaaatcgtcatctttctgaaatggtgatgaaattggaattgggtttacatgagtgttccttgcctgtatctccccttggttcaatagctaccagatttttggaagaggaggaactgaggtctcatcacattctagagcgcttggatgcccatattgaagaactaaaaagagagagtgaaaagacagtgagacaattcacagccttaaagtagcctcttaaaaaaatcacaatcttggaaataaaaataaacaccaaagagttactgtcatctgaagtagcagctctttaaaaacatgaagagataaaattataaaaatgatacatctaaagcagtggtgaagaaagctgaaaaactgatacttttgataggcattttctctgcactggtttgtttaaaggacttcttccagcaataagttgaaagaataaaccactttgctagacttttttctcatacgaatatttattatcataaagtgatacttaccttgctgacttaaatgtgaatagctatgtactaattgaattagggtttttatgatacatgttgaaaataaagtaactgcaggaactttcttt

SEQ ID NO: 149 - DNA, 1926 bp, Homo sapiens
  misc_feature: Incyte ID No: 268514.25
cgggcgccgggcgcgcagggaccgagggaccgagtgctccccatgagcgcacgtgggccgggcggtccgcaagcccggctgagagcgcgccatggggcaggcgggctgcaaggggctctgcctgtcgctgttcgactacaagaccgagaagtatgtcatcgccaagaacaagaaggtgggcctgctgtaccggctgctgcaggcctccatcctggcgtacctggtcgtatgggtgttcctgataaagaagggttaccaagacgtcgacacctccctgcagagtgctgtcatcaccaaagtcaagggcgtggccttcaccaacacctcggatcttgggcagcggatctgggatgtcgccgactacgtcattccagcccagaatgaaggcattcctgatggcgcgtgctccaaggacagcgactgccacgctggggaagcggttacagctggaaacggagtgaagaccggccgctgcctgcggagagagaacttggccaggggcacctgtgagatctttgcctggtgcccgttggagacaagctccaggccggaggagccattcctgaaggaggccgaagacttcaccattttcataaagaaccacatccgtttccccaaattcaacttctccaaaagcaatgtgatggacgtcaaggacagatctttcctgaaatcatgccactttggccccaagaaccactactgccccatcttccgactgggctccgtgatccgctgggccgggagcgacttccaggatatagccctggagggtggcgtgataggaattaatattgaatggaactgtgatcttgataaagctgcctctgagtgccaccctcactattcttttagccgtctggacaataaactttcaaagtctgtctcctccgggtacaacttcagatttgccagatattaccgagacgcagccggggtggagttccgcaccctgatgaaagcctacgggatccgctttgacgtgatggtgaacggcaagggtgctttcttctgcgacctggtactcatctacctcatcaaaaagagagagttttaccgtgacaagaagtacgaggaagtgaggggcctagaagacagttcccaggaggccgaggacgaggcatcggggctggggctatctgagcagctcacatctgggccagggctgctggggatgccggagcagcaggagctgcaggagccacccgaggcgaagcgtggaagcagcagtcagaaggggaacggatctgtgtgcccacagctcctggagccccacaggagcacgtgaattgcctctgcttacgttcaggccctgtcctaaacccagccgtctagcacccagtgatcccatgcctttgggaatcccaggatgctgcccaacgggaaatttgtacattgggtgctatcaatgccacatcacagggaccagccatcacagagcaaagtgacctccacgtctgatgctggggtcatcaggacggacccatcatggctgtctttttgccccaccccctgccgtcagttcttcctttctccgtggctggcttcccgcactagggaacgggttgtaaatggggaacatgacttccttccggagtccttgagcacctcagctaaggaccgcagtgccctgtagagttcctagattacctcactgggaatagcattgtgcgtgtccggaaaagggctccatttggttccagcccactcccctctgcaagtgccgcagcttccctcagagcatactctccagtggatccaagtactctctctcctaaagacaccaccttcctgccagctgtttgcccttaggccagtacacagaattaaagtgggggagatggcagacgctttctgggacctgcccaagatatgtattctctgacactcttatttggtcataaaacaataaatggtgtcaatttc

SEQ ID NO: 150 - DNA, 661 bp, Homo sapiens
  misc_feature: Incyte ID No: 2100016cB1
ggccggctgagcccacctcgctgggccctccctggcgccccgccttgggcggcggcgagcgcgcgggccgccatgtcgtacatgctcccgcacctgcacaacggctggcaggtggaccaggccatcctctcggaggaggaccgcgtggtcgtcatccgcttcggccacgactgggatcctacgtgcatgaagatggacgaggtcctgtacagcatcgccgagaaggttaaaaattttgcagttatttatcttgtggatattacagaagtgcctgacttcaacaaaatgtatgagttatacgatccatgtactgtcatgtttttcttcaggaacaagcacatcatgattgacttggggactggcaacaacaacaagattaactgggccatggaggacaagcaggagatggtggacatcatcgagacggtgtaccgcggggcccgcaaaggccgcggcctggtggtgtcccccaaggactactccaccaagtaccgctactgaggcgccctcagtctgcgcggataaatgtcgtggagccctttttgtatggaaacgttttaagctatttaaagcctttggaaaatacaggaagctccagggctggagcacctctgagatggaattgataacatggtcttaactcaccgaaataaacaagcac

SEQ ID NO: 151 - DNA, 1160 bp, Homo sapiens
  misc_feature: Incyte ID No: 2906265cB1
gccatgggcaccaggctcctcttctgggtggccttctgtctcctgggggcagatcacacaggagctggagtctcccagtcccccagtaacaaggtcacagagaagggaaaggatgtagagctcaggtgtgatccaatttcaggtcatactgccctttactggtaccgacagagcctggggcagggcctggagtttttaatttacttccaaggcaacagtgcaccagacaaatcagggctgcccagtgatcgcttctctgcagagaggactgggggatccgtctccactctgacgatccagcgcacacagcaggaggactcggccgtgtatctctgtgccagcagctttcttgcagggaggggaaacaccatatattttggagagggaagttggctcactgttgtagaggacctgaacaaggtgttcccacccgaggtcgctgtgtttgagccatcagaagcagagatctcccacacccaaaaggccacactggtgtgcctggccacaggcttcttccctgaccacgtggagctgagctggtgggtgaatgggaaggaggtgcacagtggggtcagcacggacccgcagcccctcaaggagcagcccgccctcaatgactccagatactgcctgagcagccgcctgagggtctcggccaccttctggcagaacccccgcaaccacttccgctgtcaagtccagttctacgggctctcggagaatgacgagtggacccaggatagggccaaacccgtcacccagatcgtcagcgccgaggcctggggtagagcagactgtggctttacctcggtgtcctaccagcaaggggtcctgtctgccaccatcctctatgagatcctgctagggaaggccaccctgtatgctgtgctggtcagcgcccttgtgttgatggccatggtcaagagaaaggatttctgaaggcagccctggaagtggagttaggagcttctaacccgtcatggtttcaatacacattcttcttttgccagcgcttctgaagagctgctctcacctctctgcatcccaatagatatccccctatgtgcatgcacacctgcacactcacggctgaaatctccctaacccagggggaccttagcatgcctaagtgactaaaccaaataaaaatgttctggtca

SEQ ID NO: 152 - DNA, 1289 bp, Homo sapiens
  misc_feature: Incyte ID No: 189155.2
gctggctgatttatggagcatctactaagtgacagtcattttacatgttgcctcatttaatctctacactttccctgagaggtgaggataattactgccatttttattaattagaaaactggatgtttagagaagttaaatcactttctgaggtcacaggtctagttaaatggtaaaggtcagagtgactgcaaagcccatgctcctttccctactccacagtgcttctcttgcaaatgacaatatagaaatgtaaactattccaatatgcaagcttgagattggacacttaacacaaacaacaggggtgaagtaaggaaaacaacttaggactcctgtgtcaacttcacagaatctatcttaaatccgttggcaatgacaaggagaaaaagagaaccactaaagaactttgagaactgcctcctcattgatgtagacaccagcctcaacaaagacctacctgagccagttcatagggtcagaaaatataaggctcagaaggatccagaataatttcctctaaacccttcattcacagagtaaataaaatgaagctaccaatgtcacaggtagctaaagttagggcttggtctagaaatctcctccttatttaaattttctttattctccactgaacaaagagaaattggaagaatgcaagagatctccccacttcagacctacagtccacctcgccacagccagtcttcaaaagaggcaggtggagagccacgtgatggcattttcagctggtgcaaaggatcttccctgccctttcagaatgccccttcttcatgcctgcctccctggctcacacagaataaatccactcctttgagcaaagacactctatcctgagaaggagtcatctgcaaaattgtatgcttttataaaggccaggccaccatcaaacattaacatgccaatataggtccaatcaagcaaagctgatttccaagaataggaagctggactaacgcagatgacttgaggctccacacagggcttgcacacaactggagtctacagatatcatttggcttgaaaagaattgaatcatattgatttctagacaaggatcctaaattgtattgcctctagaccttcagctagtacctaaagcaaaatcaattgctctagggaaaaacaagtttgtaaggacaataataacatgcaagtaaatacgtttttactaaggaatgggagggtctctcacaccaaaaagaaaatgttttactattatgaatggtgccacaataaacatacgtgtgcatgtgtctttaaaacaa

SEQ ID NO: 153 - DNA, 419 bp, Homo sapiens
  misc_feature: Incyte ID No: 336733.9
ctttctccctcttgagtccttctgagatgatggctctgggcgcacgggaataagtaccagaccattgacaactaccagccgtacccgtgcgcagaggacgaggagtgcggcactgatgagtactgcgctagtcccacccgcggaggggacgcaggcgtgcaaatctgtctcgcctgcaggaagcgccgaaaacgctgcatgcgtcacgctatgtgctgccccgggaattactgcaaaaatggaatatgtgtgtcttctgatcaaaatcatttccgaggagaaattgaggaaaccatcactgaaagctttggtaatgatcatagcaccttggatgggtattccagaagaaccaccttgtcttcaaaaatgtatcacaccaaaggacaagaaggttctgtttgtctccggtcatcagactg

SEQ ID NO: 154 - DNA, 1488 bp, Homo sapiens
  misc_feature: Incyte ID No: 1273136.1
cgcggagcgggagcggcggcgggcgcagctagcgggtcggccgccggccgggccgaccccgccgtactatcccctgcggcgcgagcccggggcggctccaagcgccccccagcagacccccatcatgggcagccagagctccaaggctccccggggcgacgtgaccgccgaggaggcagcaggcgcttcccccgcgaaggccaacggccaggagaatggccacgtgaaaagcaatggagacttatcccccaagggtgaaggggagtcgccccctgtgaacggaacagatgaggcagccggggccactggcgatgccatcgagccagcaccccctagccagggtgctgaggccaagggggaggtcccccccaaggagacccccaagaagaagaagaaattctctttcaagaagcctttcaaattgagcggcctgtccttcaagagaaatcggaaggagggtgggggtgattcttctgcctcctcacccacagaggaagagcaggagcagggggagatcggtgcctgcagcgacgagggcactgctcaggaagggaaggccgcagccacccctgagagccaggaaccccaggccaaggggggcagaggctagtgcagcctcagaagaagaggcagggccccaggctacagagccatccactccctcggggccggagagtggccctacaccagccagcgctgagcagaatgagtagctaggtaggggcaggtgggtgatctctaagctgcaaaaactgtgctgtccttgtgaggtcactgcctggacctggtgccctggctgccttcctgtgcccagaaaggaaggggctattgcctcctcccagccacgttccctttcctcctctccctcctgtggattctcccatcagccatctggttctcctcttaaggccagttgaagatggtcccttacagcttcccaagttaggttagtgatgtgaaatgctcctgtccctggccctacctccttccctgtccccacccctgcataaggcagttgttggttttcttccccaattcttttccaagtaggttttgtttaccctactccccaaatccctgagccagaagtggggtgcttatactcccaaaccttgagtgtccagccttcccctgttgtttttagtctcttgtgctgtgcctagtggcaccctgggctggggaggacactgccccgtctaggtttttataaatgtcttactcaagttcaaacctccagcctgtgaatcaactgtgtctcttttttgacttggtaagcaagtattaggctttggggtggggggaggtctgtaatgtgaaacaacttcttgtctttttttctcccactgttgtaaataacttttaatggccaaaccccagatttgtactttttttttttttctaactgctaaaaccattctcttccacctggttttactgtaacatttggaaaaggaataaatgtcgtccctttaaaaaaaaaaaaaaggg

SEQ ID NO: 155 - DNA, 2074 bp, Homo sapiens
  misc_feature: Incyte ID No: 253888.1
ggcccgcggcgcggcgccggaggaggaagtggtgaggttgttgctccttcagcgcctatcgctggctcttggggcgcagagaggggccgcagtctccgcggctgcgtcgagctcccttgcagtcccctccatgttccccggcgccactactccccttcctaaggccgccgcttaccccggggtctatggaagtaatggaaggacccctcaacctggctcatcaacagagcagacgagcagaccgtttattagctgcaggcaaatacgaagaggctatttcttgtcacaaaaaggctgcagcatatctttctgaagccatgaagctgacacagtcagagcaggctcatctttcactggaattgcaaagggatagccatatgaaacagctcctcctcatccaagagagatggaaaagggcccagcgtgaagaaagattgaaagcccagcagaacacagacaaggatgcagctgcccatcttcagacatctcacaaaccctctgcagaggatgcagagggccagagtcccctttctcagaagtacagcccttccacagagaaatgcctgcctgagattcaggggatctttgacagggatccagacacactactttatttacttcagcaaaagagtgagccagcagagccatgtattggaagcaaagccccaaaagatgataaaacaattatagaggagcaggcaaccaaaattgcagatttgaagaggcatgtggaattccttgtggctgagaatgaaagattaaggaaagaaaataaacaactaaaggctgaaaaggccagacttctaaaaggtccaatagaaaaggagctggatgtagatgctgattttgtagaaacgtcagagttatggagcttgccaccacatgcagaaactgctacagcctcctcaacctggcagaagttcgcagcaaatactgggaaagccaaggacattccaatccccaatcttcctcccttggattttccatctccagaacttcctcttatggagctctctgaggatattctgaaaggatttatgaataattaaaatggaaggccacagaaaaggggaaaagaggaaataataacagtaatcgttaatccagcaaaaagaaatgaaaagggaaaaccacatagaagggtaatcccggaaatgcttcatctggtggactgtgggagcagaggcattgccaggacttgggaaacagtcactgtgaaatgcgctgcgtatctcattcactcacttcagctaatgattccgacttggcagacgctaaactcatggaggttcggtttctcctgatacaaaccaaatggctacctggaagaatttctttcaagcaacagttatttttcttatcttcagggttaaaatgtataaaagttatgtgtaattaatctataatgccataaatgataatgcaaaacctaaataatatggtggccggaggggctgccttatatttgaaacatgctttctatcatgcattgactgtatgcattttgttaatgcacattctgtttgtttaaggtgtgtaagatacacacccttctagatgaaactatatgtgccacactttgcactactcataatgataacctcaagactatcagaagaaatatttaaatttccattttatgaagaaaggaaccaaattattatgctttttaaaacaaattaccagtttacataattaatcagggtgcattttaagttctaacttcgtttattgtataatgcatcatttgaaaataccaaggaggaaataccctttgtttttaatgatgcaagagtggacgtaatgctagttggcagtattttattgtaagaaatcaataaagtaattgtgttttatacctttgttgaacgtggttgatagttaaaaagcaaggcactgagtggcttctctgtgcgttgtaaactttgaatttgaacagatgcggttagatgattacttttgtgtgtcaaggattttttttttctttcagtgttttgtagtccatttcccttacaactagggtgacagagagtacagaagttcctgaggtttaaatgtattgtttccaaccttt

SEQ ID NO: 156 - DNA, 1334 bp, Homo sapiens
  misc_feature: Incyte ID No: 407570.3
ttcggctgacgtagggaatggctggggttggctgaagagcgcacagtggagttttaatgtccgccatgttggccatggcgtattgaagagagcgagcgagagaggagcggagcggcacagcctcccaccctcccggctggtgttagtgcccggacggggggctctgcgctccgcccctcaagtccccggcagcggttggcgagtggggaccgaacccccggttctccatgatcccgctggccggggccgtttccccagagcggagaggtatctgctgcgcctgagatgagtaaactgtcgtttcgggcgcgggcgctagacgcctcgaagccgctgccggttttccgctgtgaggatctgcccgacctgcacgaatacgcctcgataaacagggccgtgccgcagatgcccaccggaatggagaaggaagaggagtcggaacatcatcttcagcgggctatttcagcacagcaggtgtatggcgagaagagggataatatggttataccggtcccagaggcagaaagtaatattgcttactatgagtctatatatcctggggaatttaagatgccaaagcagctcattcacatacagccttttagtttggatgctgaacagcctgattatgatttggattctgaagatgaagtatttgtgaataaactgaaaaagaaaatggacatctgcccattgcaatttgaggagatgattgaccgcctagaaaaaggcagtggtcagcagccagtcagtctgcaggaagccaaactactgctaaaagaagatgatgaactaattagagaagtttatgaatattggattaaaaagagaaaaaactgtcgagggccatctcttattccatcagtaaaacaagagaagcgagatggttccagcacaaatgatccttatgtggcttttagaaggcgtactgaaaaaatgcagactcgaaaaaatcgcaaaaatgatgaagcctcttacgaaaaaatgcttaagctgcgacgagatctaagtcgagctgttactattctagagatgataaaaagaagagaaaaaagtaaaagagagctattgcacttaacactggaaattatggaaaagaggtataatttgggcgactacaatggagagatcatgtctgaggttatggcacagagacagccaatgaaacctacttatgccatccccatcatccctattactaatagcagtcaatttaaacaccaggaagcaatggatgtgaaggagttcaaagttaataagcaagataaagccgatcttatccgaccgaaacggaaatatgaaaagaagcccaaagtcttaccatcgtctgccgc

SEQ ID NO: 157 - DNA, 858 bp, Homo sapiens
  misc_feature: Incyte ID No: 977136.8
gaccctctttgtcttcatcagcatcggttctgccctgggcttcaaatacccggtggggaggggtgaaatccatactgtagacactctgacaagctggccaaagtcacttccccaagatctgccagacctgcatggtcaagcctcttatgggggtgtttctatctctttctttctctttctgtttcctggcctcagagcttcctggggaccaagatttaccaattcacccactcccttgaagttgtggaggaggtgaaagaaagggacccacctgctagtcgcccctcagagcatgatgggaggtgtgccagaaagtcccccctcgccccaaagttgctcaccgactcacctgcgcaagtgcctgggattctaccgtaattgctttgtgcctttgggcacggccctccttcttttcctaacatgcaccttgctcccaatggtgcttggagggggaagagatcccaggaggtgcagtggagggggcaagctttgctccttcagttctgcttgctcccaagcccccgacccgctcggacttactgcctgaccttggaatcgtccctatatcagggcctcagtgacctccttctgcaaagtggcagggaccggcagagctctacaggcctgcagcccctaagtgcaaacacagcatgggtccagaagacgtggtctagaccagggctgctctttccacttgccctgtgttctttccccaggggcatgactgtcgccacacgcctctgtgtacatgtgtgcagagcagacaggctacaaagcagagatcgacagacagccaggtagttggaactttctgttccctatggagaggcttccctttccatctatcactgcattatc

SEQ ID NO: 158 - DNA, 3005 bp, Homo sapiens
  misc_feature: Incyte ID No: 977136.1
gcgggccaggagcgaagagaggccttcctccctttgtgctccccccgccccccggccctataaataggcccagcccaggctgtggctcagctctcagagggaattgagcacccggcagcggtctcaggccaagccccctgccagcatggccagcgagttcaagaagaagctcttctggagggcagtggtggccgagttcctggccacgaccctctttgtcttcatcagcatcggttctgccctgggcttcaaatacccggtggggaacaaccagacggcggtccaggacaacgtgaaggtgtcgctggccttcgggctgagcatcgccacgctggcgcagagtgtgggccacatcagcggcgcccacctcaacccggctgtcacactggggctgctgctcagctgccagatcagcatcttccgtgccctcatgtacatcatcgcccagtgcgtgggggccatcgtcgccaccgccatcctctcaggcatcacctcctccctgactgggaactcgcttggccgcaatgacctggctgatggtgtgaactcgggccagggcctgggcatcgagatcatcgggaccctccagctggtgctatgcgtgctggctactaccgaccggaggcgccgtgaccttggtggctcagccccccttgccatcggcctctctgtagcccttggacacctcctggctattgactacactggctgtgggattaaccctgctcggtcctttggctccgcggtgatcacacacaacttcagcaaccactggattttctgggtggggccattcatcgggggagccctggctgtactcatctacgacttcatcctggccccacgcagcagtgacctcacagaccgcgtgaaggtgtggaccagcggccaggtggaggagtatgacctggatgccgacgacatcaactccagggtggagatgaagcccaaatagaaggggtctggcccgggcatccacgtagggggcaggggcaggggcgggcggagggaggggaggggtgaaatccatactgtagacactctgacaagctggccaaagtcacttccccaagatctgccagacctgcatggtcaagcctcttatgggggtgtttctatctctttctttctctttctgtttcctggcctcagagcttcctggggaccaagatttaccaattcacccactcccttgaagttgtggaggaggtgaaagaaagggacccacctgctagtcgcccctcagagcatgatgggaggtgtgccagaaagtcccccctcgccccaaagttgctcaccgactcacctgcgcaagtgcctgggattctaccgtaattgctttgtgcctttgggcacggccctccttcttttcctaacatgcaccttgctcccaatggtgcttggagggggaagagatcccaggaggtgcagtggagggggcaagctttgctccttcagttctgcttgctcccaagcccctgacccgctcggacttactgcctgaccttggaatcgtccctatatcagggcctgagtgacctccttctgcaaagtggcagggaccggcagagctctacaggcctgcagcccctaagtgcaaacacagcatgggtccagaagacgtggtctagaccagggctgctctttccacttgccctgtgttctttccccaggggcatgactgtcgccacacgcctctgtgtacatgtgtgcagagcagacaggctacaaagcagagatcgacagacagccaggtagttggaactttctgttccctatggagaggcttccctacacagggcctgctattgcagaatgaagccatttagagggtgaaggagaaatacccatgttacttctctgagttttagttggtctttccatctatcactgcattatcttgctcattcttcagttctctactccctcttgtcagtgtagacacaggtcaccattatgctggtgtatgtttatcaaagagcacttgagctgtctgaagcccaaagcctgaggacagaaagaccctgatgcaggtcagcccatggaggcagatgcccttgctgggcctgggggttttccaagccctcagctggtcctgaccaggatggagcaagctcttcccttgctcatgagctcctgatcagaggcatttgagcagctgaataacctgcacaggcttgctgtatgacccctggccacagccttccctctgcattgacctggaggggagaggtcagccttgacctaatgaggtagctatagttgcagcccaaggacagttcagagatcaggatcagctttgaaggctggattctatctacataagtcctttcaattccaccagggccagagcagctccaccactgtgcacttagccatgatggcaacagaaaccaagagacacaattacgcaggtatttagaagcagagggacaaccagaaggcccttaactatcaccagtgcatcacatctgcacactctcttctccattccctagcaggaacttctagctcatttaacagataaagaaactgaggcccacggtttcagctagacaatgatttggccaggcctagtaaccaaggccctgtctctggctactccctggaccacgaggctgattcctctcatttccagcttctcagtttctgcctgggcaatggccaggggccaggagtggggagagttgtgatggaggggagaggggtcacacccaccccctgcctggttctaggctgctgcacaccaaggccctgcatctgtctgctctgcatatatgtctctttggagttggaatttcattatatgttaagaaaataaaggaaaatgacttgtaaggtcaaaaaaaaagagagagaaccgaagcaagagacggaggacgacgcggagctctccagtcacggcgagcacgcaaagaaaagaagaggcccgcgcgcggctctttgaccccttcgcccgggtattatttccggccggtccctgaggtgtccagcttctcttagtg

SEQ ID NO: 159 - DNA, 1052 bp, Homo sapiens
  misc_feature: Incyte ID No: 1500085.3
agggcgagggtttggaactcgcagaggttaaacactttaagatgaaaaaaattgatctctgtctgagctctgaagggtccgaagtgattttagctacatcaagtgatgaaaaacacccacctgaaaatatcattgatgggaatccagaaacgttttggaccaccacaggaatgtttccccaggaattcattatttgtttccacaaacatgtaaggattgaaaggcttgtaatccaaagttactttgtacagaccttgaagattgaaaaaagcacgtctaaagagccagttgattttgagcaatggattgaaaaagatttggtacacacagaggggcagcttcaaaatgaagaaattgtggtaagtgaatatactttatagaattaaaaattaacctgcacaatatatttagactttaaacctatctccatagtcatagttaataaatttcctcatgatattataggtttgtacctaaatcaaccggtagagaaagttattctcaataataatataagctaaatgtacattcataaattaggttcttacctttcatagagagtgacggcaagataaaacaattcatttattttttgttttatttttctcattcatttactttgaagtatttatttggtttgctttctttcatttgattctgtaggcattttagaataggaatgaaaaaagggtcgcgatgccaaaattgaatgttaatttaagcatgaaaggacaagcgagattcatataaggggaactagagcataggatcagcaacaaataagccaaagagagatgaggtggaaagacaaccagtatttttcgacaacattccattgggctttgcttgtcaagtgaaatgaatgcccgttgatgaggaagctgctgcctcatcaggagttccgctattcctggtagttggtcaggccctggttttagacaaacacaaaacaactgaatatctatttattaggtggtcatgctttgtttaattaaggtttccctaaatgagggttaaaatagtaccttatccattaagtttacttcttcaca

SEQ ID NO: 160 - DNA, 630 bp, Homo sapiens
  misc_feature: Incyte ID No: 1439712.1
actcaacaaaataagaacaatccggacatttcttttgaactgcatgctgcttggaggacggaagaacacagatgttcccttggaaggatatttagtaacaccaatacaaagaatatgcaagtaccctcttattttgaaggagttgctgaagcggactccacggaaacacagtgactatgcagcagtgatggaagccctccaagccatgaaagctgtctgttccaacataaacgaggccaagagacagatggagaagttagaagttttagaggaatggcagtctcacattgaaggctgggaggggtccaacatcactgacacctgcactgaaatgctaatgtgtggagtcttactgaaaatttcttctggaaatattcaagaacgggtgttttttcttttcgataatcttttggtgtactgcaaaagaaaacacagacggttgaagaacagcaaggcatctacagatggacatcggtacctttttcgtggccggatcaacacggaggtgatggaagtggagaatgtggatgatggcaccgctgatttccatagcagtggacacattgttgttaatggatggaagatacataacacagcaaaaaataaatggtttgtttgtatggcaaaaac

SEQ ID NO: 161 - DNA, 414 bp, Homo sapiens
  misc_feature: Incyte ID No: 015508.1
cggagctcagaaactgccagcccagaccacaggctcagaggctgaagcaggaggaaggaaggactggaaggaaaaagagacaggttagagggaaagaggcttgggaagaaaacagcagaaaagaaactgctcattacacttacagagaggcaagtaacggtggagatgaggacagagggaaccaagactctgaaagacaaaaaatacaaatagagcgaaagaggaaaaaaatgtcaagaagaacatccatccggagaaatgaagagaatgaaagttttaagctgcagagccgttctgtgcttttccggcacaaaattatatcgctgattttaagcccttttgcatttgccagccgttgacattaagaggcatgtttaacggtgccaacagcatctccttttccttctcctcttc

SEQ ID NO: 162 - DNA, 2234 bp, Homo sapiens
  misc_feature: Incyte ID No: 111552cB1
gggaagagagatctgcagactcccagggaacctacagctttctccttcacagcattgcaggagatggtgtctcgctcttttgcccaggctggactgcagtggcacaacctcagctcattgcggcctccgcctcctgggctcaagcgattctcctgcgtctgcctcccaagtagttgggactacaggagccgaatcagaaatgtcatcctcaggcacgccagacttacctgtcctactcaccgatttgaagattcaatatactaagatcttcataaacaatgaatggcatgattcagtgagtggcaagaaatttcctgtctttaatcctgcaactgaggaggagctctgccaggtagaagaaggagataaggaggatgttgacaaggcagtgaaggccgcaagacaggcttttcagattggatctccgtggcgtactatggatgcttccgagagggggcgactattatacaagttggctgatttaatcgaaagagatcgtctgctgctggcgacaatggagtcaatgaatggtggaaaactctattccaatgcatatctgaatgatttagcaggctgcatcaaaacattgcgctactgtgcaggttgggctgacaagatccagggccgtacaataccaattgatggaaatttttttacatatacaagacatgaacctattggtgtatgtggccaaatcattccttggaatttcccgttggttatgctcatttggaagatagggcctgcactgagctgtggaaacacagtggttgtcaaaccagcagagcaaactcctctcactgctctccacgtggcatctttaataaaagaggcagggtttcctcctggagtagtgaatattgttcctggttatgggcctacagcaggggcagccatttcttctcacatggatatagacaaagtagccttcacaggatcaacagaggttggcaagttgatcaaagaagctgccgggaaaagcaatctgaagagggtgaccctggagcttggaggaaagagcccttgcattgtgttagctgatgccgacttggacaatgctgttgaatttgcacaccatggggtattctaccaccagggccagtgttgtatagccgcatccaggatttttgtggaagaatcaatttatgatgagtttgttcgaaggagtgttgagcgggctaagaagtatatccttggaaatcctctgaccccaggagtcactcaaggccctcagattgacaaggaacaatatgataaaatacttgacctcattgagagtgggaagaaagaaggggccaaactggaatgtggaggaggcccgtgggggaataaaggctactttgtccagcccacagtgttctctaatgttacagatgagatgcgcattgccaaagaggagatttttggaccagtgcagcaaatcatgaagtttaaatctttagatgacgtgatcaaaagagcaaacaatactttctatggcttatcagcaggagtgtttaccaaagacattgataaagccataacaatctcctctgctctgcaggcaggaacagtgtgggtgaattgctatggcgtggtaagtgcccagtgcccctttggtggattcaagatgtctggaaatggaagagaactgggagagtacggtttccatgaatatacagaggtcaaaacagtcacagtgaaaatctctcagaagaactcataaagaaaatacaagagtggagagaagctcttcaatagctaagcatctccttacagtcactaatatagtagattttaaagacaaaatttttcttttcttgatttttttaaacataagctaaatcatattagtattaatactacccatagaaaacttgacatgtagcttcttctgaaagaattatttgccttctgaaatgtgacccccaagtcctatcctaaataaaaaaagacaaattcggatgtatgatctctctagctttgtcatagttatgtgattttcctttgtagctacttttgcaggataataattttatagaaaaggaacagttgcatttagcttctttcccttagtgactcttgaagtacttaacatacacgttaactgcagagtaaattgctctgttcccagtagttataaagtccttggactgttttgaaaagtttcctaggatgtcatgtctgcttgtcaaaagaaataatccatgtaatatttagctataaaatgaatataaagattaataataaacaac

SEQ ID NO: 163 - DNA, 1729 bp, Homo sapiens
  misc_feature: Incyte ID No: 1641902cB1
cccacgcgtccggcgggcgtcactccggccatcgtccccacctccacctgggccgcccggcaggcaggcggtagaacgggcgtggcagacctccctgcaggcttgttgctgggcgaacgagaaggatgccatgctgacacactgacgtgctctgtctccttgcagacggaggcccgggagccatgggtgactggggcttcctggagaagttgctggaccaggtccaggagcactcgaccgtggtgggtaagatctggctgacggtgctcttcatcttccgcatcctcatcctgggcctggccggcgagtcagtgtggggtgacgagcagtcagatttcgagtgtaacacggcccagccaggctgcaccaacgtctgctatgaccaggccttccccatctcccacatccgctactgggtgctgcagttcctcttcgtcagcacacccaccctggtctacctgggccatgtcatttacctgtctcggcgagaagagcggctgcggcagaaggagggggagctgcgggcactgccggccaaggacccacaggtggagcgggcgctggcggccgtagagcgtcagatggccaagatctcggtggcagaagatggtcgcctgcgcatccgcggagcactgatgggcacctatgtcgccagtgtgctctgcaagagtgtgctagaggcaggcttcctctatggccagtggcgcctgtacggctggaccatggagcccgtgtttgtgtgccagcgagcaccctgcccctacctcgtggactgctttgtctctcgccccacggagaagaccatcttcatcatcttcatgttggtggttggactcatctccctggtgcttaacctgctggagttggtgcacctgctgtgtcgctgcctcagccgggggatgagggcacggcaaggccaagacgcacccccgacccagggcacctcctcagacccttacacggaccaggtcttcttctacctccccgtgggccaggggccctcatccccaccatgcctcacctacaatgggctctcatccagtgagcagaactgggccaacctgaccacagaggagaggctggcgtcttccaggccccctctcttcctggacccaccccctcagaatggccaaaaacccccaagtcgtcccagcagctctgcttctaagaagcagtatgtatagaggcctgtggcttatgtcacccaacagaggggtcctgagaagtctggctgcctgggatgccccctgccccctcctggaaggctctgcagagatgactgggctggggaagcaggtgcttgctggccatggagcctcattgcaagttgttcttgaacacctgaggccttcctggtgcccaccaggcactacggcttcctctccagaatgtggctttgcctgagcacagacagagtcagcatggaatgctcttggccaagggtactgggggccctctggccttttgcagctgatccagaggaacccagagccaacttaccccaacctcaccctatggaacagtcacctgtgcgcaggttgtcctcaaaccctctcctcacaggaaaaggcggattgaggctgctgggtcagccttgatggcacagacagagcttgtgccggatttggccctgtcaaggggactggtgccttgttttcatcactccttcctagttctactgttcaagcttctgaaataaacaggacttgatcacaaaaaaaaaaaaaaa

SEQ ID NO: 164 - DNA, 1419 bp, Homo sapiens
  misc_feature: Incyte ID No: 252999.1
  unsure 479, 493, 497-499, 502-504, 506: a, t, c, g, or other
gttgaccctgcaactttagaagcacaatcatttattaataatttttttgaaactcccatctacccctgttagagaaatcaacaggttctaggaattaaatatgtctctttgtaacccagagcatgttcaatttttggaaaccgtatttcagtgattttcttaataccttacatgtgtagggcatcttcccccagaatcttacagtccctttctgtgaagagaagtggacacacgtgggaactctcaccatctctggactgtcgtcaggaaacgcctgcaggtccttgccctgtctgtatggtgtcctcacttctccatccatacaggtggctccagtgggcatttttttattttaaattttttacatgaagcaatagaagtacaaaatacttattttttcaaaatttaatgtgttccatgaaacctgttggcagtcgctttccttcccccacatctaaattctttggtttttagttgtntgtttcttggattntttnnnttnnntntttgggccttgtatcccaaggactaaaagattagcacagacacgttttgatgttgaatgaactagtaagtcacagtaggtggtagtcttcattgatttctctgtaagtttttaaagaatgtatgaagatagtcacgaatgtactgagtgttcgcatcccccttcagttcaccttggctgtgtctacaggacaacaaatgtttgacagggaataaagtcgtgtctggtgtcatttgcgctagcgtgcccctcccctttcggtgttggctccaaaccttcctttccttttatgtttgtggggagtggggaaccacatcagcagcaatcatcaaccaaccaaccaatgggatctacttagtggtgaatagattggctatttaattggtaaaagttgctggtctgaccacaccacagcatgaccactgggttcatttagagatggcctccgtttccaacgttccccacaaatgtttgcttctttcccagtcaagaggggatctcgagactcccgagtggaggtcgtgagcttgcaccccgcctggctgtgtagatcgactgtatagatacatgaagtgggggtgagggccaaggggctattactgctgttgggaaatacttgcctctcgtagatccagccttaatgtttttctgacatcctagtaatagcagaccctgcacaaagtggatatcagacttaatactgtgaggagacaaaataatgagaatagttttaccaaagataatgaaatctcgcatcatgtctgcattttaccatagattggagtgcatccttaggaaactgaatgtaacaaaaacccaggacatttttggaaattgtatgctctctagcaactttgtgtgaatttttatacaaacactgttttatgagttatataaaatgttataaaaataga

SEQ ID NO: 165 - DNA, 2108 bp, Homo sapiens
  misc_feature: Incyte ID No: 977391.15
ctgccataagatggcgtccgtggcggctgcacgagcagttcctgtgggcagtgggctcaggggcctgcaacggaccctacctcttgtagtgattctcggggccacgggcaccggcaaatccacgctggcgttgcagctaggccagcggctcggcggtgagatcgtcagcgctgactccatgcaggtctatgaaggcctagacatcatcaccaacaaggtttctgcccaagagcagagaatctgccggcaccacatgatcagctttgtggatcctcttgtgaccaattacacagtggtggacttcagaaatagagcaactgctctgattgaagatatatttgcccgagacaaaattcctattgttgtgggaggaaccaattattacattgaatctctgctctggaaagttcttgtcaataccaagccccaggagatgggcactgagaaagtgattgaccgaaaagtggagcttgaaaaggaggatggtcttgtacttcacaaacgcctaagccaggtggacccagaaatggctgccaagctgcatccacatgacaaacgcaaagtggccaggagcttgcaagtttttgaagaaacaggaatctctcatagtgaatttctccatcgtcaacatacggaagaaggtggtggtccccttggaggtcctctgaagttctctaacccttgcatcctttggcttcatgctgaccaggcagttctagatgagcgcttggataagagggtggatgacatgcttgctgctgggctcttggaggaactaagagattttcacagacgctataatcagaagaatgtttcggaaaatagccaggactatcaacatggtatcttccaatcaattggcttcaaggaatttcacgagtacctgatcactgagggaaaatgcacactggagactagtaaccagcttctaaagaaaggtattgaggctctgaaacaagtaactaagagatatgcccggaaacaaaaccgatgggttaaaaaccgttttttgagcagacctggtcccattgtcccccctgtctatggcttagaggtatctgatgtctcgaagtgggaagagtctgttcttgaacctgctcttgaaatcgtgcaaagtttcatccagggccacaagcctacagccactccaataaagatgccatacaatgaagctgagaacaagagaagttatcacctgtgtgacctctgtgatcgaatcatcattggggatcgcgaatgggcagcgcacataaaatccaaatcccacttgaaccaactgaagaaaagaagaagattggactcagatgctgtcaacaccatagaaagtcagagtgtttccccagaccataacaaagaacctaaagagaagggatccccagggcagaatgatcaagagctgaaatgcagcgtttaagagacatgtccagtggcctttggaaaggtggtggggatccagttcaggagggaggggtatgtttgtctcccagtctgggcaaaggagtgctatgcggaattctctgcatagcagaaaagctcccaccattttcttttgatgtggttttaaagtctcacgttctctataatagaaacagcaggtcttgtcagctccttgtgtggctgatgtgtctggaaatgatgtagttcaggaaagcattttttttttctttgaaccttaaaggttctattattaaaagcagcacagattccacatttttatacatgaggatcttctttgtggtgaataccaggattgactgcatccctttaaagaagttttatgtccctgactctggctaaaattatctaatttccagatgcttttgtagatgactgaagtatttgtgagccacatattgggagttctagatttgagtgaatggcaggaaagggccatctccattgagatgattaagtgaaccaaactagttctcagaattctacagagaaggagggaatcagactgaggaagctgtgacataggacttgaagaccaaagactttgaaatttgcgagctgctcatgtgtgagttattatcactgctgtctttctattgagttacaaatctatatttttattgaagtttaaataaagaaaaaatttacaagac

SEQ ID NO: 166 - DNA, 3316 bp, Homo sapiens
  misc_feature: Incyte ID No: 1363208cB1
gcgattccgagccgttgagacgcctctgcggcagctggtggcgcaggtggcttgcgtggacgcgggtagaggcgaccggccagcaaccgcagcgtcggcgcccgcggccccggcagcaggcgcgtcgggacgccccgaggcatcctcccccgcccgcgggcccggtagctgggcccgcgtccgccgcccgcatccccgcgccgccgcatctcctcgccgcctcccgggcttcggacccccggtctcgcccccgaaacatgactcgcgatttcaaacctggagacctcatcttcgccaagatgaaaggttatccccattggccagctcgagtagacgaagttcctgatggagctgtaaagccacccacaaacaaactacccattttcttttttggaactcatgagactgcttttttaggaccaaaggatatatttccttactcagaaaataaggaaaagtatggcaaaccaaataaaagaaaaggttttaatgaaggtttatgggagatagataacaatccaaaagtgaaattttcaagtcaacaggcagcaactaaacaatcaaatgcatcatctgatgttgaagttgaagaaaaggaaactagtgtttcaaaggaagataccgaccatgaagaaaaagccagcaatgaggatgtgactaaagcagttgacataactactccaaaagctgccagaagggggagaaagagaaaggcagaaaaacaagtagaaactgaggaggcaggagtagtgacaacagcaacagcatctgttaatctaaaagtgagtcctaaaagaggacgacctgcagctacagaagtcaagattccaaaaccaagaggcagacccaaaatggtaaaacagccctgtccttcagagagtgacatcattactgaagaggacaaaagtaagaaaaaggggcaagaggaaaaacaacctaaaaagcagcctaagaaggatgaagagggccagaaggaagaagataagccaagaaaagagccggataaaaaagaggggaagaaagaagttgaatcaaaaaggaaaaatttagctaaaacaggggttacttcaacctccgattctgaagaagaaggagatgatcaagaaggtgaaaagaagagaaaaggtgggaggaactttcagactgctcacagaaggaatatgctgaaaggccaacatgagaaagaagcagcagatcgaaaacgcaagcaagaggaacaaatggaaactgagcagcagaataaagatgaaggaaagaagccagaagttaagaaagtggagaagaagcgagaaacatcaatggattctcgacttcaaaggatacatgctgagattaaaaattcactcaaaattgataatcttgatgtgaacagatgcattgaggccttggatgaacttgcttcacttcaggtcacaatgcaacaagctcagaaacacacagagatgattactacactgaaaaaaatacggcgattcaaagttagtcaggtaatcatggaaaagtctacaatgttgtataacaagtttaagaacatgttcttggttggtgaaggagattccgtgatcacccaagtgctgaataaatctcttgctgaacaaagacagcatgaggaagcgaataaaaccaaagatcaagggaagaaagggccaaacaaaaagctagagaaggaacaaacagggtcaaagactctaaatggaggatctgatgctcaagatggtaatcagccacaacataacggggagagcaatgaagacagcaaagacaaccatgaagccagcacgaagaaaaagccatccagtgaagagagagagactgaaatatctctgaaggattctacactagataactaggttgacatacctggaatatagagaacacttgagaagtttgtaatggttttcatttgaaatagactgctgaaagttttaaatttttataagcataggtttgatgttgaaaacttgttttgagggagaaaatccctttgttttaaagtaaagtaaacattatcgctaagtgtacttgtgcagtattaacagctacattatacagtaaatgtgggataaaatccatttagaaaatgttaaactgcttttccagacatggttgtagcatattttcaattagtgtgtgtatgttaatgtgtaattgatagtagaacaaagttacatttttaaaactgctacttgtataaaccttgcctcttttcccaaatactgtgggttttgtgcatagtttttacaaaccttggatttaccagactgtcttttcactgtttgtgggttttgtagaagttacacatttttatggtagataaaatgttacttctatacaagtactcactccctttttatcaaaagttaattttaatctcacagtctacattgtgctacattatccagcttctttggaacaatgtgtgctctgtatggttttttttggtatgacaactaattaagcaactgacattgaactgagaattctacaaactataaaacattaatttttgaaggtaatttagttttgtggctgggcattcagtgaagtcttaggacttctttgcagacaactgactgggtatatataggaatgaatctggctttagggttaaatcatttaaggtccttttataggcaggcactagtaactaaaactgaaaactaagtaagtttatttttgaggaatgttgttaaaaatgtctttaggaagtcactaaaacttaattggaagaaaaaatcatgatgcttatacaataaatatgaataaatgttatataaggaaactcacctatttgaaatcatggctatattgtttttattttctagattccaaaaatacaaacactagttgttccagcattgtactttgataagtctgtacattgacgtgtatggactaaatccagggtaaaatcaatgttacaaaatttaagggtatgttaactaaaggatagcatttctaagatattttgaatattagggtcatttggcacttctcagcaagtaggatacttctcatgttttgaaattatatgaatatggaaaaaaatggcttaagaccagcgtctctgtatgacattgtgtggttgaccctctgagataactgttttcatctacagaattgcatttttgcttttaaagaggtcttataatggaactaggaatcaccgttttgagagaacctgcatatataccagtcattatctgtttggtccttatacagttttaacttacttagatttattctagttaagccataagttcaacgtgtaaacttgttttcattaaagaatttttctatcaaaaaaaaaaaaaaa

SEQ ID NO: 167 - DNA, 1950 bp, Homo sapiens
  misc_feature: Incyte ID No: 002776cB1
cggggcgggaagcgcttcagggcagcggatcccatgtcggccctgaggcgctcgggctacggccccagtgacggtccgtcctacggccgctactacgggcctgggggtggagatgtgccggtacacccacctccacccttatatcctcttcgccctgaacctccccagcctcccatttcctggcgggtgcgcgggggcggcccggcggagaccacctggctgggagaaggcggaggaggcgatggctactatccctcgggaggcgcctggccagagcctggtcgagccggaggaagccaccaggagcagccaccatatcctagctacaattctaactattggaattctactgcgagatctagggctccttacccaagtacatatcctgtaagaccagaattgcaaggccagagtttgaattcttatacaaatggagcgtatggtccaacataccccccaggccctggggcaaatactgcctcatactcaggggcttattatgcacctggttatactcagaccagttactccacagaagttccaagtacttaccgttcatctggcaacagcccaactccagtctctcgttggatctatccccagcaggactgtcagactgaagcaccccctcttagggggcaggttccaggatatccgccttcacagaaccctggaatgaccctgccccattatccttatggagatggtaatcgtagtgttccacaatcaggaccgactgtacgaccacaagaagatgcgtgggcttctcctggtgcttatggaatgggtggccgttatccctggccttcatcagcgccctcagcaccacccggcaatctctacatgactgaaagtacttcaccatggcctagcagtggctctccccagtcacccccttcacccccagtccagcagcccaaggattcttcatacccctatagccaatcagatcaaagcatgaaccggcacaactttccttgcagtgtccatcagtacgaatcctcggggacagtgaacaatgatgattcagatcttttggattcccaagtccagtatagtgctgagcctcagctgtatggtaatgccaccagtgaccatcccaacaatcaagatcaaagtagcagtcttcctgaagaatgtgtaccttcagatgaaagtactcctccgagtattaaaaaaatcatacatgtgctggagaaggtccagtatcttgaacaagaagtagaagaatttgtaggaaaaaagacagacaaagcatactggcttctggaagaaatgctaaccaaggaacttttggaactggattcagttgaaactgggggccaggactctgtacggcaggccagaaaagaggctgtttgtaagattcaggccatactggaaaaattagaaaaaaaaggattatgaaaggatttagaacaaagtgcaagcctgttactaacttgaccaaagaacacttgatttggttaattaccctctttttgaaatgcctgttgatgacaagaagcaatacattccagctttcctttgattttatacttgaaaaactggcaaaggaatggaagaatattttagtcatgagttgttttcagttttcagacgaatgaatgtaataggaaactatggagttaccaatattgccaagtagactcactccttaaaaaatttatggatatctacaagctgcttcttaccagcaggagggaaacacacttcacacaacaggcttatcagaaacctaccagatgaaactggatataatctgagacaaacaggatgtgtttttttaaacatctggatatcttgtcacatttttgtacattgtgactgctttcaacatatacttcatgtgtaattatagcttagactttagccttcttggacttctgttttgttttgttatttgcagtttacaaatatagtattattctctaaaaaaaaaaaaaaaaa

SEQ ID NO: 168 - DNA, 3042 bp, Homo sapiens
  misc_feature: Incyte ID No: 140557.23
cgaggctatttgaaaacacgctccgggagctagagcctgaggtcggcggcgcacgctgttgccccgtgggcttctgctccctcgcttgtcttctcgggcttctcgccccggccgcggccgggtcctcagtagtcgagaatgactaaaaaaagaaaacgccaacatgattttcaaaaagtaaaattgaaagttggtaaaaagaagcccaagttacaaaatgctactcctacaaactttaaaacaaagactatacatctgcctgagcaactcaaagaggatggaacacttccaacaaacaatagaaaacttaacataaaggatttgctgtcacagatgcatcactacaatgctggggttaaacaaagtgctcttcttggacttaaagaccttttgtctcaatacccatttataattgatgcacacctttcaaacatattaagtgaagtgactgctgtgtttacagataaagatgctaatgtacgattagcagcagttcaacttcttcaattcctggcccccaaaatacgagctgaacaaatttctccattttttcctttggtaagtgcccatctctctagtgccatgactcacattactgaaggaattcaggaggactctttaaaagttttggacattctgctggaacagtacccagctctaattactggccgtagcagcatattgcttaagaattttgtagaacttatttctcatcagcagctgtccaaaggactgataaatagagacagatcccagtcctggatactttctgtaaatcctaatcggagactcacttctcagcaatggaggctgaaagtcttagtgagactcagtaaattccttcaggccttggcagatggatccagtaggttgagagaaagtgaaggacttcaggaacagaaagaaaatccccatgccactagcaactccatttttatcaactggaaggaacatgccaacgaccagcaacacatccaggtttatgaaaatgggggttcacagccaaatgtcagttcacagttcaggctacggtatctggttggaggactgagtggtgtggatgaaggcctgtcatctactgaaaacctgaaaggatttattgagataataattccattgctaattgaatgctgggttgaagctgtacctccacaactagctactcctgttgggaatggtatagaacgagaacctctacaggttatgcagcaagttcttaatattatttcccttctgtggaaactctctaaacaacaggatgaaacccataaattggagtcatggcttcgaaagaactaccttattgattttaaacaccattttatgagtcgttttccatatgtcttaaaagaaataaccaagcacaaaaggaaagagccaaataaaagcatcaagcattgcacagttctctccaataacatagatcatctcttactgaatttaacactgtctgatatcatggtctccctggcaaatgcgtcaactttgcagaaggattgcagttggatagaaatgataaggaaatttgtaacagagacccttgaagatggctctaggctaaatagtaagcaactgaacagattgctgggagtatcctggaggttaatgcaaatacagccaaacagagaggacacagagactcttattaaggcagtttatacattatatcagcagaggggccttatccttccagttcggactttgttattgaagtttttcagtaaaatctatcagacagaagaactgagatcttgtagattcagatatcgtagtaaagtgttatcccgttggctggctggcttaccattgcaacttgctcatcttggctcccgaaatcctgagctctctacacagcttatcgatatcattcataccgctgcagcacgagcaaataaagaattactaaaaagtttacaagctactgccctccgaatttatgatccacaagaaggtgctgtggtggttctccctgcagactctcagcagcgtttggttcagcttgtatatttcctacccagtctgccggctgatttgctttctcggttaagtcgttgctgtattatgggaagactcagttcaagtttggctgccatgcttatcgggatactgcacatgagatcatcattttctgggtggaagtattcagctaaagactggttgatgagtgatgtagactatttcagcttcttattttccacacttacagggttttcgaaagaggagttgacttggcttcagagccttcgaggagttcctcatgtcatccagacacagctttcccctgtgcttctctaccttacagatttggatcaatttttacaccactgggatgtaacagaggcagtttttcacagtttattggttattcctgcccgaagtcagaactttgacatcttgcaaagtgccatcagtaagcatttggttgggttgactgtaattcctgacagcacggctggctgtgtttttggtgttatctgtaagctcctggatcatacttgtgtagttagtgagactctactgccatttctggcttcttgttgctacagtcttctttattttctgctcactatagagaaaggggaagcagaacatctaagaaagagggacaagctgtggggggtctgtgtctccatcctggctctcttgcctcgagtcctcaggttgatgctgcagagcctgcgggtgaacagagttgggcctgaggagctgcctgttgtgggccagctgcttcgactgctgcttcagcatgcacccctcaggactcatatgttgaccaatgcgatcttggtgcagcagatcatcaagaatatcacgacattgaagagtggaagtgttcaggaacagtggctcacagacttacattactgcttcaacgtgtatatcactgggcatccccaagggcccagtgcactggctacagtgtattgaagaggccatagtacctcctgtttgaagttgtttattcacatctatcttatttgaagaaaaagactgatgtaatagatctttgtcattaaagctgaacttttaaagaagtttaaa

SEQ ID NO: 169 - DNA, 6096 bp, Homo sapiens
  misc_feature: Incyte ID No: 140557.22
  unsure 4436, 5334: a, t, c, g, or other
cccacgcgtccgcccacgcgtccggcggccgaaagcctcgggcggccttttgaggggctcggctagcttcagcgccgtggggtctgacctggctggatatagtgtaccggcccggcaggaggggcggcccggtccgggttgcgcctcctggagccgcccccgggacgtcagtcctggaggaggcgagggttgctccggttgctaagaagactatgaacaagtcagagaacctgctgtttgctggttcatcattagcatcacaagtccatgctgctgccgttaatggagataagggtgctctacagaggctcatcgtaggaaactctgctcttaaagacaaagaagatcagtttgggagaacaccacttatgtattgcgtgttggctgacagattggattgtgcagatgctcttctgaaggcaggagcagatgtgaataaaactgaccatagccagagaacagccctccatcttgcagcccagaagggaaattatcgtttcatgaaactcttacttacacgcagagcaaactggatgcaaaaggatctggaagagatgactcctttgcacttgaccacccggcacaggagccctaagtgtttggcacttctgctgaagtttatggcaccaggagaagtggatacacaggataaaaacaagcaaacagctctgcattggagtgcctactacaataaccctgagcatgtgaagctgctcatcaagcatgattctaacattgggattcctgatgttgaaggcaagatcccacttcactgggcagccaaccataaagatccaagtgctgttcacacagtgagatgcattctggatgctgctccaacagagtctttactgaactggcaagactacgagggtcgaactcctcttcactttgcagttgctgatgggaatgtgaccgtggttgatgtcttgacctcatatgaaagctgcaatataacgtcttatgataacttatttcgaaccccactgcactgggcagctttattaggccatgcacagattgtccatctccttttagaaagaaataagtctggaactatcccatctgacagccaaggagccacacctttgcactatgctgctcagagtaactttgctgaaacggttaaagtgtttttaaaacatccttcagtgaaagatgattcagacctggaaggaagaacatcctttatgtgggcagctggcaaaggcagtgatgatgtccttagaactatgctgagcttaaaatcggacatagatattaacatggctgacaaatatggaggtacagctttgcatgctgctgctctttctggccatgtcagcaccgtgaagttattactggaaaataatgctcaagtagatgctactgatgttatgaaacatactccacttttccgagcctgtgagatgggacacaaagatgtgattcagacactcattaaaggtggagcaagggtagatctagttgaccaagatggacattctcttctacattgggcagcactgggaggaaatgctgatgtttgccagatattaatagaaaataagatcaatccaaatgtccaggattatgcaggaagaacccctttgcagtgtgcagcatatggaggctatatcaactgcatggcagttctcatggaaaacaatgcagaccctaacattcaagacaaagagggaagaacagctttgcattggtcctgcaacaatggataccttgatgccattaaattactgctagactttgctgctttccctaatcagatggaaaacaatgaagagagatacacaccccttgattatgctttgcttggtgagcgccatgaagtgatccagttcatgttggagcacggtgccctgtccatcgcagccatacaagacatcgccgccttcaaaatccaagctgtctacaaagggtacaaggtcagaaaagccttccgagacaggaaaaatctcctcatgaagcatgaacagttgagaaaagatgctgctgccaaaaagcgagaggaagaaaacaaacgaaaagaggcagaacagcaaaaaggaaggcggagcccagattcctgcagaccccaggcccttccctgtctgcctagcacccaggatgtgcccagcaggcagagccgggcccccagcaagcagcctcctgctggcaacgtggcccaaggccctgagccaagagacagcagaggatctccaggagggtctctaggcggagccctccagaaggagcagcatgtttcctcagatttgcagggaacaaactccagaaggccaaatgaaacagccagagaacattctaaaggccaatctgcttgtgtccacttcagacccaatgaaggcagtgatggaagcaggcatccaggagttccctctgttgagaagtccagaggtgagacagctggcgatgagcggtgtgcaaaggggaaaggcttcgtgaagcagccctcctgtatcagggtggctgggcctgatgagaaaggagaggactccaggcgggcagctgcaagccttccaccgcacgatagccactggaagcccagcaggcggcatgacacagaacccaaggccaaatgtgccccccagaaaaggcgcactcaagagctcagaggaggaaggtgctctccggctggttctagccgccctggcagtgcccggggggaggcggtccatgctgggcagaatcctccccaccatcgtacaccaagaaacaaagtgacacaagccaagctcacaggagggctctattcacatttgccacagagcacagaggagttgaggtcaggagctaggaggctggagacatctaccctgtccgaggactttcaggtatctaaggagactgatccagcacctggtcccctctctgggcagagtgtgaatattgaccttctccccgtagagctccgactgcagataattcagagagaacgaaggaggaaggagctgtttcgcaaaaagaacaaggcagcagcagtcatccagcgcgcctggcgaagctaccagctcaggaagcacctgtcccaccttcggcatatgaagcagcttggagctggagatgtggacagatggaggcaagagtctacagcattgctcctccaggtttggaggaaggaactggaactaaaattcccccaaaccactgcagtaagcaaggcccccaagagtccatccaagggcacctcaggcacaaagtccaccaagcactcagtgcttaagcaaatctatggttgttctcacgaagggaaaatacatcatcctacaagatctgtaaaagcctcttctgtgctgcgtctcaactcagtgagcaacctacagtgtatacatctccttgagaacagtggaagatcaaagaacttttcttataacctgcaatcagctactcagccaaaaaacaaaacaaaaccttgactgcctatggaggaagactgtgttcgggggagctggcatagctagtgcagagttcagattttctgctgataatcttttacaccttgggaaaactttaatatccgtacctgaaggctgattcacctaaaaatgtgttaactgaaagaaaatgtcagaatgtttcctttctgctcttacacagcattgttttgtcaatcaacacagcctgcactgaaaggacctgcatagactatgtctgtgcaaagtgcctgagtgtctgctttcacctcagtctgtacagttggaaatgagaattcataattaacagcaaaatctaaggaaaactacggctgctgggttgggatttctgccagctagctggtactggcttcttgtttcaagagatgaacctaaatgagataggaagcctgtcccatagcagccttcctctcactactttcctggcatctaatgcaacaaacttatcacacacacacaaacaccacacacccacaccatactacacgtcccactattacttcaaaattaatcaggtttaaattttagatcagaatcattgcccactgttttcatttagaaattgtccaaaagaccatagatacattctggtgattccttacattttacagttcctacgttagcctctcaaggccacaagttgccgccacgtcttcactgaatgactttctcagtgctgaataccaacagccgtattacagtatcaaggattctgtcaggtagggtttacagaccagactgttcatgcagcaaggtgctaactcaggcgtcaacgttctacttgtattttctgaccaacttgcagaagtgagcaatcttcttaaaatgccatttctgttggcaggtaagaatgaaacggcacacatcctagcattctaagaacacctggtttaaataaaatccagtgatgatgggctctttcacattgtttaaggggaaagctgctgtgagaatattgacagtaggcataaacagtgatatattttactcacaggtattttgggggtngctttcattttcttcagatcagtgccacttctgtgctaacggtaagagatagacagataggcaatgaagtgttcacttaattaccttggtttttagtttactaattattacattcatcgtttttgtgatcacaaaaacacaaagaaggaggtctgcctggatgggattacaaagatttagccagtttcttggtatataacagaaggtaccacagtatcactctctattttgtaaatatttagctcctatgaaatgcacaatgcacaaccgcctatgaccatgtatcgtgtgctagtccgggaagccagcctacacatcaataggaacgcccaaacattattttcatatatcagtgcaaagaaagaaggttcgtaaacttctttaaaagttcagctttaatgacaaagatctattacatcagtctttttcttcaaataagatagatgtgaataaacaacttcaaacaggaggtactatggcctcttcaatacactgtagccagtgcactgggcccttggggatgcccagtgatatacacgttaaagcagtaatgtaagtctgtgagccactgttcctgaacacttccactcttcaatgtcgtgatattcttgatgatctgctgcaccaagatcgcattggtcaacatatgagtcctgaggggtgcatgctgaagcagcagtcgaagcagctggcccacaacaggcagctcctcaggcccaactctgttcacccgcaggctctgcagcatcaacctgaggactcgaggcaagagagccaggatggagacacagaccccccacagcttgtcccaaatgcttactgatggcactttgcaagatgtcaaagttctgacttcgggcaggaataaccaataaactgtgaaaaactgcctctgttncatcccagtggtgtaaaaattgatccaaatctgtaaggtagagaagcacaggggaaagctgtgtctggatgacatgaggaactcctcgaaggctctgaagccaagtcaactcctctttcgaaaaccctgtaagtgtggaaaataagaagctgaaatagtctacatcactcatcaaccagtctttagctgaatacttccacccagaaaatgatgatctcatgtgcagtatcccgataagcatggcagccaaacttgaactgagtcttcccataatacagcaacgacttaaccgagaaagcaaatcagccggcagactgggtaggaaatatacaagctgaaccaaacgctgctgagagtctgcagggagaaccaccacagcaccttcttgtggatctagtgaggtggatagacatattaaaaacaactataaaagacatgcaaaccagagattaataaagcagatcaatgacttccattgaattatgggctaacattttatgctgaattttatgaatatcaattacataaaagcataattatattaatatcataaaacacatatgtatggcttgttaagctactgcataaaataaaacaccaaacataatttaaagatttaatatacaagtgtcttgttagaaataaaaactttcaggggggtaataaggaaaagagattgaatgcaaagtaaacaagcaattttgctaaacagtgacaattacatcaacctgacttaaagcaaaagactttgtttgctgtgtg

SEQ ID NO: 170 - DNA, 1106 bp, Homo sapiens
  misc_feature: Incyte ID No: 1286746cB1
gccggcgctttatagctgcagcctgggcggctccgctagctgtttttcgtcttccctaggctatttctgccgggcgctccgcgaagatgcagctcaagccgatggagatcaaccccgagatgctgaacaaagtgctgtcccggctgggggtcgccggccagtggcgcttcgtggacgtgctggggctggaagaggagtctctgggctcggtgccagcgcctgcctgcgcgctgctgctgctgtttcccctcacggcccagcatgagaacttcaggaaaaagcagattgaagagctgaagggacaagaagttagtcctaaagtgtacttcatgaagcagaccattgggaattcctgtggcacaatcggacttattcacgcagtggccaataatcaagacaaactgggatttgaggatggatcagttctgaaacagtttctttctgaaacagagaaaatgtcccctgaagacagagcaaaatgctttgaaaagaatgaggccatacaggcagcccatgatgccgtggcacaggaaggccaatgtcgggtagatgacaaggtgaatttccattttattctgtttaacaacgtggatggccacctctatgaacttgatggacgaatgccttttccggtgaaccatggcgccagttcagaggacaccctgctgaaggacgctgccaaggtctgcagagaattcaccgagcgtgagcaaggagaagtccgcttctctgccgtggctctctgcaaggcagcctaatgctctgtgggagggactttgctgatttcccctcttcccttcaacatgaaaatatatacccccccatgcagtctaaaatgcttcagtacttgtgaaacacagctgttcttctgttctgcagacacgccttcccctcagccacacccaggcacttaagcacaagcagagtgcacagctgtccactgggccattgtggtgtgagcttcagatggtgaagcattctccccagtgtatgtcttgtatccgatatctaacgctttaaatggctactttggtttctgtctgtaagttaagaccttggatgtggtttaattgtttgtcctcaaaaggaataaaacttttctgctg

SEQ ID NO: 171 - DNA, 815 bp, Homo sapiens
  misc_feature: Incyte ID No: 1102234.13
tactttgtcaagaacaagttttattaaaagtgctgagtgataatcccactttgctgtcttggccttcttattccttggaagccgagtctggacagggagatggacaggtgctcgctgggttgggggaccctgcaagaccacagctgggaccagccccagagaactcttcccacctggtagctgcattccctgagctgggtggggatgcttactgcatcagggttttttgtaaaagcacctcctctacctgaatcatcgtgcccccccgctaggaagctgctggcacagagatacagggccgagtcgtccagctccaaggcgttcacattcagctcagagctataattagggaactggagacctgagaatctaggagggaagtttcctctgccattctcttcctccctataatactgaaagataaactggggcccctgacccagggcctgttggtaccaggacacagtgttgtgcccagactgagaagagcatctcagagtcacttgctgtcctctcgttttgatcaggtgtgtgggactttgggtgactccagtctccactgagcctgctcccaggagacaaagcagcgcccagcagaggagcccagggcccatggcacagtggggcaggcagcactgcacctgattcagggcttggtcctcctggggaagagccgagtgaattctgggccttgattttcctaataggaggggtatcctgtgatgtcactgtcctgtgtcctccccatgcagccttccttatgtccagtgctcagtggatgatcctggagtctctacctgtcctgcagagctgaa

SEQ ID NO: 172 - DNA, 882 bp, Homo sapiens
  misc_feature: Incyte ID No: 1401226.4
ggaaatatattttgaggtaaaatactttgattccttcggggctactgtgtgtcatgtgatgctataccggagtcccgttgaattgggtatcttattgctacagagagtctgttttgtcagtctaggatctctgtttttattttaatgttggtcagttgtgtctaaattccagagcggggcaggtataatggggcatcccgagccctccttcccattcatggcctgaactggtttttcaggtttctttgggtcccggtggctgcaaggggatgcactcagttggctgggggacttagaattttagttttggtttacagcaggatttgatgggcatgcatatttatcaatgtgaaagtgttgtctgtgggcggcggagggcttgggccgtgtccaggccacgcactgcaagggtgcagcccccacacacggtccctgctcctaaagctgttgcccccactgcaagagtggagtaggttgaggtgtagccatgacattctggaaactacattttttgtaatagtcattttgaaaataaaacatttgaaaatactgtgcagcaaaaacttgaataattggaataaaaatgttcagtttaatgtcattgcttgctgccaccgttttctgattgtaaaactaacgtgattattaggtactattttggtaatgtagaaaactttaaagatgaaaatagatatcacttataactccacatggagaaatagttgcccctccaatttaattgatttacttttgggccacaggggcccagaatttgattcattgtactccttggttcatgccagtgttcctgcacccagcactgaagctgaacattgacagtgatttgcccctgccccagagtcctcctgcattcccctcgag

SEQ ID NO: 173 - DNA, 6703 bp, Homo sapiens
  misc_feature: Incyte ID No: 331677.2
  unsure 5664: a, t, c, g, or other
ggaggcttggaggcaagcgctgcccgcgagctgagccgccggaggaggagccgcgggcaacgaggtttctctgtcattcacagaaaaatgaatcatttaaacctttggaggactcagttatcacaatacttctctactaccaactaagatttatgatagtaaatttatgagagcaaatttccatgttatagaactgttgaagaactaaaagaggatattctttcatcaaaataattctgcagtatcataatattactaaataaaattaaaaagcacaattattaaattattaaatttgccacacatgtgcagcagctactgtatcctgatagtgaccaaacctcaaatataaatggtttcccttcatgggaaaagccattatatttggaagaaaccactgaacattgttattaaatatattttcagctaactgtcatttaggagaattttcatgaaacaagttctagaaagttccaagtcccaccagtaagtggatttgatattatggcagcaacttacagacttgtggttagtactgtgaaccactacagcagcgtggtgatagaccggcgttttgaacaagctatacattattgcactggaacctgccacaccttcacacatggaattgactgcattgtggtacaccatagtgtttgtgcagacctcttgcacatccctgtgtctcagttcaaagatgcaggtctgaactctatgtttctaccccatgaaaatgggctttcttcggctgaaggagactatccccaacaggccttcacaggcatacccagggtcaagagaggatctacatttcagaatacctacaacttaaaggacattgcaggagaagcaatcagttttgccagtgggaaaataaaagaattttcctttgaaaaactcaaaaactctaaccatgcagcttacagaaagggaaggaaagttaagtctgactcatttaataggaggtcagttgatttggacttgctttgtggccattataacaacgatgggaacgccccatcctttggtttactgcggagttcctcagttgaggaaaaacctttgtctcatagaaactcactggatacgaacctgacttccatgtttcttcaaaacttttctgaagaagacttggttactcagattttggaaaaacataaaatagataatttttcttctgggacagacataaagatgtgcttggacatcttattgaaatgctccgaggatttaaaaaaatgcacagacatcataaaacaatgcataaagaaaaaatcagggagtagcatcagtgaaggaagtggtaatgatacaatttctagctctgaaactgtctatatgaatgtaatgaccaggttagcatcctatctgaaaaagttaccatttgaattcatgcagtctgggaataatgaggctctagatttaacagaactgatcagtaatatgcctagcttacaactgactcccttctccccagtgtttggcactgaacaaccccctaaatatgaagatgttgtccagctctcagcttctgactctggacgatttcaaactattgaattgcaaaatgacaagcctaattctaggaagatggacactgtacaatccattccaaacaactccacaaattccttatataacttagaggtaaatgatcctagaactctaaaagctgtccaggtccaatcacagtcattaaccatgaatcctttagaaaatgtttcttctgacgacttaatggaaactctttatattgaagaagagtcagatggaaagaaagcattagataaaggacaaaagacagagaatggacctagtcatgagttattaaaggtaaatgaacatagagcagaatttccagaacatgctactcatcttaaaaaatgccccaccccaatgcaaaatgaaattggtaagatatttgagaaatcatttgttaatctacctaaggaagactgtaaatcaaaagtttctaaatttgaagagggagaccagagagattttacaaattccagtagccaggaagagatagataaattgttaatggatttggaatctttttcacagaagatggagacctctctaagagagccacttgcgaagggtaaaaactctaattttttaaatagtcacagtcagttgaccggtcagacccttgtagatcttgagcctaaatctaaagtctcttcacccatagaaaaagtctcaccttcctgtctaacaaggattattgaaaccaatggacacaaaatagaggaagaggatcgagccctcttactgcgaatcctggaaagcattgaagactttgctcaagaactagttgaatgcaaatcaagcagagggagcctatcacaagaaaaggaaatgatgcaaattctacaggaaaccttgacaacttcctcccaggccaatttatcagtctgtagaagtcctgttggtgataaagccaaagatactacttcagcagttttgattcagcagactccagaggtgatcaagattcaaaataaaccagaaaagaaacctggaacaccactcccacctccagccacctctccaagtagtccccgacctctctccccggttccccatgtgaataatgttgtgaatgcgccattgtccataaacattccacggttctactttcctgaaggactcccagatacctgtagtaatcatgaacaaactctaagcagaattgaaactgctttcatggatattgaagaacagaaagcagacatttatgaaatggggaaaattgcaaaggtctgtggctgtcctctctattggaaagcccccatgttcagggctgcagggggagagaagacaggatttgtgacagcacagtcattcattgccatgtggagaaagttgctgaataaccatcatgatgatgcctctaaattcatctgtcttctagcaaagcccaactgcagctctctagaacaggaggatttcatccctctacttcaggatgtggtggatacccaccctggtctcacgttcctgaaagatgctccagaattccactcccgctacatcaccacggttattcagagaatattctacacagtcaacagatcttggagtggaaaaattacttcgacagagataagaaaaagcaactttttgcaaaccctagcacttttggaagaagaggaagatataaaccaaattacagattacttctcctatgaacatttctatgttatttattgtaaattctgggaactagatactgatcacgacctctacatcagccaggccgatctgtctcgatacaatgaccaggcttcatcaagcaggattattgaaaggatattctctggtgcagtaacaaggggaaaaacaatacagaaagagggaagaatgagctatgcagattttgtttggtttttgatctctgaagaagacaaaaggaatcctaccagcattgagtattggttccgctgcatggatgtggatggagacggtgtactctccatgtatgagctggagtacttctatgaggagcagtgtgaacggatggaagccatgggaattgagcccttgccattccatgatttactgtgccagatgcttgacctagtgaagccagctgttgatggcaaaataactctaagagatctgaagaggtgcagaatggctcacatcttctatgacactttctttaatctggagaaatacttagaccatgaacagagagatccctttgcggtccagaaggatgttgagaacgatgggcctgagccctcagactgggaccggtttgccgctgaggagtatgagacgcttgttgcagaggaatctgcccaagcacaattccaggaaggctttgaagattatgaaacagatgaacctgcctctccctctgaatttggaaacaaaagcaataaaatattaagtgcaagccttccagagaaatgtggaaagcttcaatcagtggatgaagaatagctgccggtgtctacaatgaaacgaagatgtgtattttaaatgtttctttcttgtgaagagatgttctcgtttgcatactgctttttaaagactttgatttctccaagtgtgtatcatctgcactaggaactttgtttttaagcaataggtctggatacacatttaacttaggaggctcctccaatttgcctcaaacctcttacggagcttctcctcagaagtggtaccatcgccttccaaagtcagcactctacactcttgaatgtaccaaggatctcttggcgacagtaccaagcacggttctctacacaggtgactgaagttgcctctgtgttggctggcatccctgagtcccctccgggctcctatggagcctagaagaaaccttcacttgcagaaaacttgagtcagaaaattctggaacttgaaaaagtagtaagggcctccagaattgacttagccctagtaataaaagcactgccaaaacatctcagagacttcttttatgtatactggagttcaaagatctttaacttacctggcttaatgtaatttcacagttacctgccaaactactagtcactttacatcctcaggtattgtaaccactgggccttccaactttgctggcaagctctggtaacctccctgactgtggatcttatataaaatctcaagataaaaaaacacttcttaaatgaagtatagaatttgactcatacttggaaaaagcccttttaacttttatcttttattcattgaactattgaatgatgtatttaatatccaaattagttgataactgttttcacttcctatcagaaggcctgcttgaagacataaaggaataatgatacattaaaattcttactagatagatatattccttcctcccaggagtattagactagctaatagtaaaggcctcaacgttattctttacttcatgttgaaaacaattactacagatatttcatccacctcagtatttatcaaggaaatggaaaatgatacagctataaaagaaagctgttatttactgcagttgtagatgtattcactacagaatcctacatttttcagcaggccacagtccagccaaatcctataatatccttgaaaagaaactattaaaaaggatagacatttctgatgtaagtaaaacccccaagcaacttaatatccatctgtcagtcatcaacttttcccctagattttttttttaactagttctgaaagtgtcaagaatagcttccctttccaccctacctaggttccctccttgctggcataaaggccaagcagtgaaatgaaccttgggttagagttatggtaggcaaaaagaaaaggagaatttaggaaataaatatgctataaacaaggtacagtacagtgagagttaacaatcctaggaatcctgcctgtcacaagctcccagttccctgtcattttatcttcatgattagaactgatcttccatttaactattacagaaagcagtaactattgcaactatctaatagttcacacaaaagaattaaaagcttaaaaataatttttaggaaacacaatattcaaaatctaaacacactgataaattattaagattaagattatttatgtgataaatgaaatctcctaccaatccatccagcctttaccagggaagaaaagcaattatttcatttcaggatagaaatacaaaanaattaaaaaatacttttcttagaagccagatatggtttaaatgttttattatccataatgatctaaactaataagattcaccaaaaagtaaaaattcaattttacaatatacatttttttttttaactatttggctttacctttttaccttggttctccttactgaagtcctcttgctttcactttgatctggtttttgaagtctcttaattattggctgggcatggtgactcatgcctgtaatcccggcactttgggaggccaagggaggtgatcacttgagcccaggagtaaagaccagcctgggcaacatagtgagactccgtctctacaaaaaataaatttagctgggcatggtggtgcacatctgtagtcctaccaacttgggaggctgaggcaggagaatcgcttgagccccaggcttcgaggctgcagtgagctatgattacgacactgcactccagcctaggcgacagagcaagaccccattctcttacaaagtctctattataaaagtacatccatcaataccattccatttaaaatgggctattgtaatttacccacattatcacattttcaggaattataagaatgtgttttattgtactccttccttggagctgaatgcaaggaatgtgaattctgaggaattaaggtagaatatatttgactttctggtaaagatcatggttaagtataatcattactgccaaactggaattttcaagttattataatatcccaggccccttgataaaagctgagggttatcatgaccttaatgctaattcaatgagaaatgagtttaatagcataacattaccaaggtaatcaaactaataaaattccatatatcttccctgcatcttgtcactgtgtaccattcaaagtgtttataaaactctagattcatcaaatgagatttgctcagctttttgaaatgttaagatgtgtttggagaaggctgcatgactttgtttttcccttttagcaaaactaaataaagttgtcaaatatgaatcatgttcattaaaaa

SEQ ID NO: 174 - DNA, 2664 bp, Homo sapiens
  misc_feature: Incyte ID No: 234870.4
ctagggagtgacgtgggggacaccctggagtacaaccccaacctcctggatgacccgcagtggccctgcggcaagcacaaacgtgtcctcatctttgcgtcgtacatgaccacagtgatagaatacgtgaagccctcagacctcaaaaaggacatgaacgagaccttcagggagaagttcccccatgtcaaactgacgctgagcaaaatcaggagcttaaagcgggagatgcggagcctgtcggaggagtgcagcctggagcccgtgacggtggccatggcctacgtgtactttgagaagctggtcctgcagggcaagctcagcaaacagaaccgcaagctgtgcgctggcgcctgcgtgctgctggctgccaagatcagcagtgacctgcgcaagagcggcgtgaagcagctcatcgataagttagaagaaaggtttcgattcaacaggcgcgacctgatagggtttgagttcacagtgctcgtggccttggagctggccctgtatcttcccgagaaccaagtgttacctcattacaggcgcctcacccagcagttctagcagaggccccacagaaggctcagggcaccgaggtgcacttgccggcctgggaggtgtcccactgaagccccgcgcctcctcctgccagcacccccagcacctgctagcaggaggcacctggcctccgctggtgcagctttcctttttgcctctttgccatttccttggaaagagacgtcgctttcatccccaagtgcaccgtccctccgaggggatttctgagaattctcctgcatttttacataaactaaatgtgaggtttgttactggtatttttttcacgtgcctgagaccagcctggtaccaggaccttttgttcacagcgtgcagcagcgagccggctgcagtgtgtctcccctggcctcgccttctgcaaaccaccgcagccaccacagcgtcagggtggagatctgggtttctagacctcactgaacacactggaatggctgagtttaacttatttaggcattcatcttggagatgtggtttttcgggttccccagcagcatctcccgacaccaactgtgccgctggctccctgccacctgaagccgagctcctccagagctttctccgcccacctcactgcatcccaagtggagcttttggtgtccagttaggccagcgggagcagtctcctgatttattttgatctcattcttggactcttggacctctctgttcttcaagcatcgtgtcactgtgaaatcctaacgcccctgtgtcctacagaccgacggcacaacagacagctgcccatcccatgccatgctctaccctctgcctctcaccaggagacactctgggcctccaggacaattgctgcttgccggctcttatttttctaagcaatattgtgatggagaaaaataacatatttattgggatttggttttttgggtcttttttttttaagggaacaaaaaatggttaaatgaggtctgctgaagttgacttgaaaacacacttgaccctcaggcaggagggcactgaccacaccccacacaacctcaaagggtcagtgcgtcagtgccttttcttctgaggcaggaaacaggtgccatcttggccacctcggccagggcagcccaccatgctaaaaggaccccaaatggtggtcgttgtcccttctgtgcaggccagcagggccccatctctagtttttccacgtctgtctgaagttcttgcaacaaattctgcatggtccagcgctccagctagctgcctcatcaaaaacactgaataaccaaggactgctgagtttttcttcatggggggtcagctggtctcaaaactggccactgcctcagccaccaagctttttcctaccactaccttataaacctgcctggccctggaggggctctgggacgactttgtctctagcccattaatacaatacatcctatgctttctgtgcagactggtgcttccgcagaaaggagatgccaattctgctatcacagaactccaccagcaactccacccgaccccagcagtggtgcaggacagctgccagcacccacctggccctcctccttttccacagccactcactggggccaccaaaacccagagatggcaggtgtgtgggacagactggaggatgaggacaaaccaaagcctttgttctttcttattgtggagcgtccccttccatcaagcagcctgccctcaagccaaggatcatcccctggaacccagtatgcacccagaggggactcaacttcaaagctgctccaccatgctgggtcccaggcagctttcctctgaaaagcaacctctcctgccacccagatcccatctcaagagctcgcccatgttacgagcatgtaaaggactgacttcctagtaactgttgcagtttacaacctgccctccagggacacgtctccatggttttttctacacatgaatgcgagaaatggctgataagcacagtaatttaagattgcgtattcacgtagtgagatttagtcattaaccaacccggtctttgtgatgtgtgaagccttcccttcagttatgtcccatttttatgatgccaaaagctgccactgtgtggtattcgaggattattgcaacaaagccagtagttaaacc

SEQ ID NO: 175 - DNA, 1402 bp, Homo sapiens
  misc_feature: Incyte ID No: 346051.5
ccaagctgcagatccaggtcaccacctagaggggaggaagacctcgctttggagagtgggaataaaacgctcgtggaaaagggcttttctgggaaagtgaggccaccatggctctggagaagtctcttgtccggctccttctgcttgtcctgatactgctggtgctgggctgggtccagccttccctgggcaaggaatcccgggccaagaaattccagcggcagcatatggactcagacagttcccccagcagcagctccacctactgtaaccaaatgatgaggcgccggaatatgacacaggggcggtgcaaaccagtgaacacctttgtgcacgagcccctggtagatgtccagaatgtctgttaaccttgagatgcctggtagacatcagctggacatgtcaagtgggcagttgaatatgtgggcctggagttcagggaagagtttggaggtgtaaatatgggagccttcagcagagaggatacccaggccaccagatgcgataataatgctgatggagttgaatagatagaaacaggatgggtccagctctgagccctggggcactccaagaagaggtccaggcaaagatgaaggagcagcagatagtcatcggttttggtggaaaacccagtgtgtgatgtcctgtaggtcaggaagtctttaaacgagagttaactgaacagcggtggcgaaagctgctggtggtcaggtgagacctgagaaagcgctggctgtagaggccgggaagtagcctgattggaatggggtcaagagcctgggcggagagggactcacaggcttagtagtaaagtattttgctttggtagaagttagctgtaaagggaagaaaagaaatgaagcactagttgcagggataagtatgatcaggagagttttgtaattttgttaagatggatgaaaaaaacatgctggaacatggcagatgggaatgatccagaggaagggggaggtaaccatgcagcagagagaggagaggctgctggaactatgtaagttggctaccagggatgggtccggttctggcatcatgtggccttaggagcatagccaggtcattcatagtggctagaggaagtcccttggagagggccagaggaagtagaaattgtcctctgattatttcctgctgcactgggaaatgaaatcaaggtcgtcactgtgtgggaagcagatagatacgaggtgggtgtggggaatttgaagtgaaaggagagaagaaatgagagtgggacagcgaacggactgttgtgattgccttttagtcttttgcagagtccagtagctggaccaggactgcagaggaggagatggaattgcctgttctcaagccttggttactgaaagtgaatgttccagatgctatggggcaaccgtgc

SEQ ID NO: 176 - DNA, 859 bp, Homo sapiens
  misc_feature: Incyte ID No: 232055.1
  unsure 313, 374: a, t, c, g, or other
ttatagttgacctctaaattttctgaattttgctgaaagaattaatacccttattagatgcatctactcaaatctgacagtctgaaaacggttacctttttactttttttcatctttaacaattttttctgaagatcgagttcctcagttgacctgaaaatttcagaaatgtgtttcttctttagaaaataagacaaactacagttttgttctgtcgatactgacacttggccgcacacacacagtctcagaaaaggaaaagagaagtagtgtgtagattaattcttaacacttggcccatacgcagacacantctcagaaaaggaaaagaggagaggtactatgtagattaatcctaaccagataattcatcnccttagaataaataacgtgggattgcctacattttctgaatccatatattaataattttgaaaaatttgagtacactgtagctggtaagaactaaattaaatttgatcacatgacattgtttactctgtgcattaagttttcttgaagttttaaggttgggaactcccacagggttaccttccaggaagtcctcctgggacaagcatgtcctataaatgccagcttactgatataaaaatctctcatatttgaaaacgcattctaattaacttttaagaacaagttgcaataaagattgtttatacttacacataaccatttggtgtaattggtagaaaaatcctatttgacatcctcacattgcttaaaattctctctgctgtttaaattgctttaaaaattgttttatgcctcatttaatataaattaaataagggtactggatgtccaattactgctcaataaaaatatttgtttttatttt

SEQ ID NO: 177 - DNA, 1799 bp, Homo sapiens
  misc_feature: Incyte ID No: 070248.106
ttctagatcgcgagcggccgctcgatctagaactatccagagtttcgccatggcccggggccccaagaagcacttaaagcgtgttgcagcgccgaagcattggatgcttgacaaactaacgggtgtatttgcacctcgtccatcgacaggtccccacaagctgagggaatgtcttcctctgatcgtcttcctcaggaatagactcaagtatgcgttgactggagatgaggtaaagaagatatgtatgcaacgtttcatcaaaattgatggcaaggttcgagtggatgtcacataccctgctggattcatggatgtcatcagcatcgagaagacaggtgaacatttccgcctggtctatgacaccaagggccgttttgctgttcaccgcatcacagtggaagaggcaaagtacaagttgtgcaaagtgaggaagattactgtgggagtgaagggaatccctcacctggtgactcatgatgctcgaaccatccgctacccagatcctgtcatcaaggtgaacgatactgtgcagattgatttagggactggcaagataatcaactttatcaaatttgatacaggcaatttgtgtatggtgattggtggagccaacctcggtcgtgttggtgtgatcaccaacagggaaagacatcctggttcttttgatgtggtgcatgtgaaggatgccaatggcaacagctttgccacgaggctttccaacatttttgtcattggcaatggcaataaaccttggatttccctgcccaggggaaagggcattcgacttactgttgctgaagagagagataagaggctggccaccaaacagagcagtggctaaattgcagtagcagcatatctttttttctttgcacaaatcatacatcattttatttttagagagaattcattccaagcctgatgatgttaatcacaacattggtcctactatttataggcacgatcatctctctcagagaaagggtcgaagttctggcacatcaggaacaatttctactccgacatgttccaatacatcccttgatcgactgttttcccttccgaattatgctgaaggacaacacacatgcagagctttctagtatgtgttcagatatcacatactttcacagtcgggttcccagctatagcctctgagatatttgacatctttatcatttcatatttatacgtagaagagcattctgaaaaataggagatctagtttataaatagttgttcactcactcttgattagttgttaaaaacaacaaatagcaaccctcatggtactccatctggctcattgcacgcgatggtttacaagcactgcttaggaatccaccccaggaacctctccacccttttacttagtaaaaacggtccttgtctaaaatctgtagaagctcacacaatgcaaaatttgaactcaaacctatcttttcatgtcaaagccaggaacaaaagagacgcactggaagtacaactgaagcatgaccaaggtaagcctaaaactgaagagtaactgtcagatattgaatgattttaaattgatgaaaatcatttagagaatctaataataaaattacggtatctttttttttttctgcaccattcaaattatgtgtcagctgaggattacaggctcattttcaacacctacccagagaacattattataatataatcttgagacaaaaaagaagggggagagagggattaagcaataaacgataaagcctattaagaattaattgatctagattttatatctccttgaatttgtaactttgtcatga

SEQ ID NO: 178 - DNA, 566 bp, Homo sapiens
  misc_feature: Incyte ID No: 028253.6
gtggggtggaagggaccacatccagcaggctgagagggcaaggagttggtgcacacctacaagggctgcatcaggtcccaggactgctactccggcgttatatccaccaccatgggccccaaggaccacatggtaaccagctccttctgctgccagagcgacggctgcaacagtgcctttttgtctgttcccttgaccaatcttactgagaatggcctgatgtgccccgcctgcactgcgagcttcagggacaaatgcatggggcccatgacccactgtactggaaaggaaaaccactgtgtctccttatctggacacgtgcaggctggtattttcaaacccagatttgctatgcggggctgtgctacagagagtatgtgctttaccaagcctggtgctgaagtacccacaggcaccaatgtcctcttcctccatcatatagagtgcactcactccccctgaaaagctatctgaacagaggaagataatgtagtgtgaagtccccatttgtcctcagcctgtaactccccgtgtgcctataaagaagttaatagagcaagcctgaa

SEQ ID NO: 179 - DNA, 951 bp, Homo sapiens
  misc_feature: Incyte ID No: 989381.1
gacttgggggggtctctgccagctggaagtgcttggctccacttagcagctaaacttaggcttttcaatcgatcgcttttgaaagggaattgtatttctgtccccgtgcggattccagaccaaaattgaaaaaatggttgacctcacccaggtaatggatgatgaagtattcatggcttttgcatcctatgcaacaattattctttcaaaaatgatgcttatgagtactgcaactgcattctatagattgacaagaaaggtttttgccaatccagaagactgtgtagcatttggcaaaggagaaaatgccaagaagtatcttcgaacagatgacagagtagaacgtgtacgcagagcccacctgaatgaccttgaaaatattattccatttcttggaattggcctcctgtattccttgagtggtcccgacccctctacagccatcctgcacttcagactatttgtcggagcacggatctaccacaccattgcatatttgacaccccttccccagccaaatagagctttgagtttttttgttggatatggagttactctttccatggcttacaggttgctgaaaagtaaattgtacctgtaaagaaaatcatacaactcagcatccagttggctttttaagaattctgtacttccaatttataatgaatactttcttagattttaggtaggaggggagcagaggaattatgaactggggtaaccccattttgaatattagcattgccaatatcctgtattcttgttttacatttggattagaaatttaacatagtaattcttaagtcttttgtctgatttttaaagtactttcttataaatttggatcatgttatgatttgtaacattcacacaacacctcacttttgaatctataaaagaattgcacgtatgagaaacctatatttcaatactgctgaaacagcatgtatt

SEQ ID NO: 180 - DNA, 1941 bp, Homo sapiens
  misc_feature: Incyte ID No: 984009.1
ctcttttcattgtgtatcagtttccatgaaagacctgaataccacttacctcaaattaagcatatgtgttacttcaagtaatacgttttgacataagatggttgaccaaggtgcttttcttcggcttgagttcaccatctcttcattcaaactgcacttttagccagagatgcaatatatccccactactcaatactacctctgaatgttacaacgaatttacagtctagtacttattacatgctgctatacacaagcaatgcaagaaaaaaacttactgggtaggtgattctaatcatctgcagttctttttgtacacttaattacagttaaagaagcaatctccttactgtgtttcagcatgactatgtatttttctatgtttttttaattaaaaatttttaaaatacttgtttcagcttctctgctagatttctacattaacttgaaaattttttaaccaagtcgctcctaggttcttaaggataattttcctcaatcacactacacatcacacaagatttgactgtaatatttaaatattaccctccaagtctgtacctcaaatgaattctttaaggagatggactaattgacttgcaaagacctacctccagacttcaaaaggaatgaacttgttacttgcagcattcatttgttttttcaatgtttgaaatagttcaaactgcagctaaccctagtcaaaactatttttgtaaaagacatttgatagaaaggaacacgtttttacatacttttgcaaaataagtaaataataaataaaataaaagccaaccttcaaagaaacttgaagctttgtaggtgagatgcaacaagccctgcttttgcataatgcaatcaaaaatatgtgtttttaagattagttgaatataagaaaatgcttgacaaatattttcatgtattttacacaaatgtgatttttgtaatatgtctcaaccagatttattttaaacgcttcttatgtagagtttttatgcctttctctcctagtgagtgtgctgactttttaacatggtattatcaactgggccaggaggtagtttctcatgacggcttttgtcagtatggcttttagtactgaagccaaatgaaactcaaaaccatctctcttccagctgcttcagggaggtagtttcaaaggccacatacctctctgagactggcagatcgctcactgttgtgaatcaccaaaggagctatggagagaattaaaactcaacattactgttaactgtgcgttaaataagcaaataaacagtggctcataaaaataaaagtcgcattccatatctttggatgggccttttagaaacctcattggccagctcataaaatggaagcaattgctcatgttggccaaacatggtgcaccgagtgatttccatctctggtaaagttacacttttatttcctgtatgttgtacaatcaaaacacactactacctcttaagtcccagtatacctcatttttcatactgaaaaaaaaagcttgtggccaatggaacagtaagaacatcataaaatttttatatatatagtttatttttgtgggagataaattttataggactgttctttgctgttgttggtcgcagctacataagactggacatttaacttttctaccatttctgcaagttaggtatgtttgcaggagaaaagtatcaagacgtttaactgcagttgactttctccctgttcctttgagtgtcttctaactttattctttgttctttatgtagaattgctgtctatgattgtactttgaatcgcttgcttgttgaaaatatttctctagtgtattatcactgtctgttctgcacaataaacataacagcctctgtgatccccatgtgttttgattcctgctctttgttacagttccattaaatgagtaataaagtttggtcaaaacagatc

SEQ ID NO: 181 - DNA, 653 bp, Homo sapiens
  misc_feature: Incyte ID No: 404758.7
ccaagaggccttcctcactttcctctgtgtgatagtgtatctgcagcctgatcggtgccatggaacagacaccctcagtcatcatcctcatcaggacagtcagccctgaactcaagtcttacgcttagggagttctttttctcctccttcgtttgttgggcttcatccctccacccctcatcttcggggctggcatcgactccacctgcctgttctggagcacgttctgtggggagcaaggcgcctgcgtcctctacgacaatgtggtctaccgatacctgtatgtcagcatcgccatcgcgctcaaatccttcgccttcatcctgtacaccaccacgtggcagtgcctgaggaaaaactataaacgctacatcaaaaaccacgagggcgggctgagcaccacatcagagccagacaggattcagaataaggagagaatgacatcgtgcggcagggtcctggaggccactcgcgcggctgggccacagagtctactttgaaggcacctcatggttttcaggatgctgacagctgcaagcaacaggcactgccaaattcagggaacagtggtggccagcttggaggatggacatttctggatacacatacacatacaaaacagaaaacattttttaaaagaagtttcctaaaat

SEQ ID NO: 182 - DNA, 3529 bp, Homo sapiens
  misc_feature: Incyte ID No: 208350.1
attacccaatccaactttctcatattgcatgtagagaacctgagacacatatcaaagtctagaatccttaacttctccccattttgtttttttccgcctcatcacaccatgctgcctttccctcatatgatcaccaaccagtagctgagttcaaaaactacatatttcttgggcagtcctctactggtatgtgatgccaacttttatttctttcgaagataattgccttctttgcctagccaagcagccaattttattggagaaaagcaagttatatgttcacaaaatggaaggctttctacctaaatttatttcatctgtggtcctcttattctcttccattgcttttgacatacagtggaaaaacttggccaacgatgtgctctaaatatagtgcttgtgttgggttaacttttccattaatttctcaacatcaattattcaggcccctacagttgtggtattgaggcccctaaaggcttctgcctttcaccaattagtgctgccagttactgaggcttctcccaaaaggtatcagtccagtcttaaagatatttcattgtgaaagaagaaactaaactatcaggcctcttttacaaaatgagagattgaatttaagcttgtcaagcacgtactggaaggtatgaattacactaccatgtgttttgtatcttccctttcaagtgatgatgttaaatgaaggtaagtttttcatccttttttaatttttgttttttataaatcatttcagctttttctggtttatagaggtgtcttatttctaatgcaacagacccccaactttaacagatttgatatggatgcatttattcacaagcaaccccaaaagtccaaaaatgtaataattttgacaaggcccaaagttgagatgctatgaagcttgtgtgtgtgaaaagtcagttatgattgtctggagagaagctgtggtgtgtatgctgtagagtttccacatttcacatgcagtgtactccaaaaagcgggtttgggtcaaccatttcccatctctttttaagaagtgactgctgttggggccaggggacatcatgggaggtggggctgtccagttagctgtgccctgcaccttcagcccaggaaagatttgaacagagcaaaggcttcaagagagggcagaatgtattcggcagaaaagggactcaggtaagcccagcctgggatgagagcagaaaagcattcaagatttgcaggccttgctatggatgcgcttaatcaccatggaggccagcaatacccatctcagcatggctttgatattctctacttcctggcctttaaaaatgacctataatttttcagtttgctttactatattttataaagaaaattctatcttatggttgattgagcattgagacttatgaaggcattaggatagatagctcaggaatgtaaaggttcagaaaaggtctgttttctcagattaacaaatatgatggattccatggctgaccttggtgcttaaaccaggaggtttcaatctagtcctagagttgtgtccctctgaaaggcccaatgccatgtaactaactttaaactggatatatactttgagccttacttaattcacagataagttgacttaactcagtatttttatttcaattaatgaaaacagtcctcttttcaaccccaggttgcttacattttgctggtctccccaagtgaccattggtggagaccaattaatgaaggaatgaaattcactttattgggactgtggtattcaacagagccacacttaaccactttttccaatgaagaatctccagaatgataatgcccaaatatggatggccaagaagaatttgtatctacggtgtgctttatgtgtttttgacactgctgtattctgtgtgatcaagtgatttgcagctggttccaatgtgactgagtgttctcaaagatttctagtaactaagtcaacttaattttcttaagcctggtattactatcagcctcacatttaccactttgattctagttttttaactgttcataacagggcataccgagggttgggatgagagcctacttcctacctcttaaggcactttcctcattattttgccatataatcttgaactgcatgataagctgtttaaatgtccatgacttctcccagagcaactagcaaagtatatgacattttgaatagagattagtggaaaggaaaatgtagagatttaagttcagaggtacaaacctcaataaaacctccttagagcacataccatgagtagagtatatgtaaacgtatatgagaagagagtcgctataatagtcctctctaagtagattagttcattgtctaatggaagtgaacatctttactcctgttatcaccatagtactgaatgaactgtataatgagtttttcaaacaagtatttaaaatagaactttcacgtacaaagcaagggcataaagattttggtttgtgtttctgtaagtgtagtttaccatctaaagctttggtttttaattttaaaaaaagcttcaaggtattgccattccttagcatccttattgattatgggtgatgagtttttaactcttaaaatcatatacgtgtattagtttatcttaactgttgccctaagcaaaagggaaggtatacacctaagggatgtacttattttgcatttttggtcatgggtgggaatggggtgggtgcctacttaaatagtttttaaaaaagaaaaaaatcacaaatatttttctactgttatatatgatcttcctttatactagtttctctctagtaaggcatgccagaagcccaagataccatatcatgaattcttacatattgtaccttttgttggtggttaaatcgcatcagatgcttggcattgctgccataattataaaatgcttgtaaaggatcaaatatcactaaatactttaaattgttttacttaagagtctaatctgggaagttttcaaatcatactattaatgtgtaatctaagctcttcagatgtatccatgaataatcctggaacaatattgcttgtattcctgtcatagaacaggttttgtaatctttaaaagaaatgaaaatttatataataaagtttcaaaacaacaacaaacaaacaaaacaaaacaacaacaaaaaacagtagccagaattggggctgggctggaggagcctgactggactccagcggacaggatgtgaaaaaggaccaggggacagaaagatgtatctgtctcacaaagaggagggtgggatggggatgggggaggcggtggtagtcacaaccccctttgagaacttgatgaaactactagacctttctggttcagaaaaagtacattcatccatacacacaaaatcctgtatacaatttcagattagggagaagttaaaatctcctgacataaacaagctcgaacactctggggtcaggtaccatcctgtccctccttccctgtcccttgcccttccccccaaggagaggagtcgggggacaagacgacgtaag

SEQ ID NO: 183 - DNA, 1721 bp, Homo sapiens
  misc_feature: Incyte ID No: 334193.1
ggtatgagccactgtccccggccagatttttttaaaagtaggtatcttgtgggatttatgttctgagagatacacctaaggaaatgctgccctacagtgtttttgctagttcatactcattacaaaggtttcttgttgttgggtgcccctctagccagtggtagtaaaatgggaagagacaggtcaagactcccttggaccatggcattgagagagggatggctgtcggcatagatatgttggttatttaggcatttgtgagggaggcccctggctcttccagcctgtttccttaggatcccagttggccgggaacagctgtacaagggtctgctgaactggtggtttcagcagactacccagttcctaagcatccatgagacagagggaaccaacttgtatttccagaacaattttccaaaccttttctggctgtactttaaaagtgccaaaaaggcaatgggtgtttatgacactaaagtcacatacaagctagtatgatacatacatcatagaaagcttatagttgctcagtgacaaagcaaaggaagtttaatattttccagttttgttcattaccgaagacagtctacggttcatagttttcactaaattctaagcagattctatatcctaaaacatttaaacctcactaggcctgcaattttgagagggttagctaaatatgtttggtatcacttcagagtctaaaaccagattactaatcgtgtgtaaggaggcattttgtgtgtctttgcaatgtatacaattggattatttggaacaccattttgaatgtgtatttgagagaaagctcgcctgtgggttttgagttgtggtgtaatggtgaacatgtagccacgtgaaaggccgttggatctttgttctgattcttcagtcgtcttcttgcaaattcagagaaatgtcttttaatcatttcgtttacatatcccagatccttggaaatcatgaaaaataacttgccagagtttgcatcagccctcagtaagtcatgaaccatagagaaggtcatggggccatttattctttggaccactggctacttctgaagttctggcttccttctctctaggaggagtcgtgtattcaagcttttaagttaaatgcataaaaatgagttttacttctcttctgacttgatttttaattttatgaaatgggaaataatgtttttccatttttctgttcattttgaagtgggaatttgaggtgtttgtaatgtcatgttactgttctgaaagattgacagtaaagaagacaagaaatatatgtatgtagtatgcatattagttttgtcccaccaagcctatctttgaatggcaaacattttaaaaacatctgttctagttgcacaactactctagcttctttataaagtaaacaatcttaaagtaagcaatgttggccataatttcaatattctagccttgccgagtgtgaatatattttactcagagactatgtacaaatacactaaagtggtgatggtgatcaatattgtaaagaatttattctgataaatgagaaactggatataatgtcaaaatagctattttctcaataaaaatctcaaatctcctgactgcttatgaattctcgatttaatgttatttattctttgaggtaaatcttttcatcgcgaagaattttttgctggttgaatgtggttgttcagggctgggactgagctatagacatag

SEQ ID NO: 184 - DNA, 460 bp, Homo sapiens
  misc_feature: Incyte ID No: 335046.8
ttggccagtttttttacagtggctctgaaatgagagaaattgcagaaattctccctgctcaggaaaaggtagaggcaaggattgacttaaagatgggtaagaagcgtgttactgatcataagctaaatgtggacaaagtaattaaaaatattaacacaatttcttcggagttgaagaagataaaagagctctcccagttattgctttgtgaccttatcctacattttaatcatcccatcaagactgagaacttagcagaagcagaaagaaacaaccccctctttgaagagtctaaaatatcagatgtatcccttgtttctaacagtttttctatctgatttcttatttgttatgagtttctgttttattgttgaactaacaaatatttgggagagttgagtttactaatttgtatatatataatttaaaacaaaataaaaataatgtaaacaagcaaaaa

SEQ ID NO: 185 - DNA, 2263 bp, Homo sapiens
  misc_feature: Incyte ID No: 198947.2
caggaatccaacagtaacatttttcctttaggttaagcagtaatttttttgaattgtcatttttaatgggtctcacacatgcatattgctaatatcattcatgtttgaggttttcaacaaagaaccaatttattaatataatgtacaaaaatagttggttcattttctgaattcagtctttgaaataaaactccttgttttggccgtgtttctgaatgtattggtgattcacccccaagctaattttttaaagtcatttttgaagttgggaagtctcatgagagatgttgaagtatgtatttaatcaagagtcatgatttcaaactagttttacatattaagcagttagtgttctaatttaatgggtaaatgtgtgtttggataaatatctgaaaattttatccttaagtatatataattatttgcctcttatatgtcttaaagctatttaaacaaggtgttaaatgagccaaaacaattaagtaattagaacagtacatttttatcagagtgtctgtcatatgcaatgaatgtatgtaatactaaaaaatcatgactacttttatcaaagaaaaaccacacattaatcctattaatcatgaaagcgtagcattgtaaattaaaggttttctttgaggctcttgaaagtgatcccattgctttcctgttttaaaaatattttatgctctttatttccacttctgtgaatgtgatatttctattttgtgattatgttactgaataaacaaacttgctacataaaattcttagcaattaaaaaaattctgattctgccattttgtctcaaatgtaatatacccttttaatatcatatgtttacatatttatgaatgattaatcatttttgtttgcattaaactttatgaaatgtcagaaatgattttactctaatgaaactcaaattttgcccaaagtagcaatattcttaaagatgttgaattttgactggttgaattttatatagtaacacacaagtcgtgatcatcaatattattgcagaccaggactctgcttatatgccttgctaacaaagatttctttcacagaggcttttctcctctcaagacttaaagtaagaattacattttattaagtccagtaaatggcccaaggcttccttttgttaatataaaaaaactctttgaagagagaaatattatatcctaaaacctctaaaccacaaacattcaattgaaagagttctgttgaaggataatgacatactgactgcttacagaccaagttgcttgcattttgtatgtttagccctcctttgccactgcttttagagccttggaaggctaagtgtgatagtaatgctagctctaatgcatatttaaaggagactgcctcgcttttagaagacatctggtctgctctctgcatgaggcacagcagtaaagctctttgattcccagaatcaagaactctccccttcagactattaccgaatgcaaggtggttaattgaaggccactaattgatgctcaaatagaaggatattgactatattggaacagatggagtctctactacaaaagtctttgggtatttgtttcttacatagaaaatgctaacatgaatagaaagatactggtgcaagaccattcccgggaaagtagacatacttacatttttttccttttctgctcatttgaatgaactcaattttatgttaaattgttatatcagagtgacaaataagtgctatggcttgatagaagtgaagctcttcacatatattcaaaatacatatcacaaactttggtaaataggatagtaatctgaagaacttttgccctttttaccccatttactgtaactcttgtttctaggtaatcgttctctctcaacaaacttctcaagcgtctgtgtaacaagccacatgttctaacaaattgtctccatcgcacttcaacagccaggtccctattttttataacgtattaaccttattattttcttattattttaaaagaatctatgcacattagcaaaatttaaaagatagagaaaaatataaacagaaaaaattatgtttacttctaccaccctaaatcaactattatcaattttatacatattttactccatcttttttcaaagtttcttacattttccaatgtcattaaaattctctgtgaatgtaaattttaaaaactgtacctactgttttttggaaatctgtaacaagctatgtgtaatcattcttctaatattaaacatattgtgtccagaattt

SEQ ID NO: 186 - DNA, 1257 bp, Homo sapiens
  misc_feature: Incyte ID No: 014669.1
  unsure 126-147, 247-343: a, t, c, g, or other
gcacgatcccattaatgctgtatgtgcttctccctcagctcaaaattcccaggagccacatgctgccttgcaacagaggacccaaagagaaactgctaccagttttcctcatcttatatatcactnnnnnnnnnnnnnnnnnnnnnncttacatagagcttacaacatgccaagcactgttcggagcttcccatagtcaaataatcctcgtagcaatcctacagaaataggtactatttttaatctnnnnnnnnnnnnnnnnnnnnnnnnnnnnnnnnnnnnnnnnnnnnnnnnnnnnnnnnnnnnnnnnnnnnnnnnnnnnnnnnnnnnnnnnnnnnnnnnnacccaaatcgtgacaacaaaggacagatggctcagaaggtcacccagtcttcaaactgtgtttgtgaaatccttttccccagctcacctggcgatctgtttaattgccgtgtgaaccatttgtttagctctcattcaacgttgaggcaaaactgggatcttggtccaggcaaagccccacaggaggatacgtcccccactacattcagggccttcctttgagcacagatgtccatcctccactcctcggtcctaccttacacatcgcctagggtgtttgaccctcattgttttctggagtttaggcttctggacaccacacaggccagtctgaaggggaatgctaagcacagtggacagtagaatccacctggtgtgctgcccattcattcggctgcagtatggccctctctgtgtctcccaggaaacactgaacagtggtacatcacccgccctgcgtatctctcccgatatctgggaactattgtactacctctctaatttctcttttctaggctgaatgacccatttcttcagcctcctctcaaaggcaatatttctcagcccttcagtcattttcattgctctcttctggcctctctccaagattctgtatcttgtttaaatagtgaagtccaacaccgaacatgatttaagaacagtcatgcctggaaaagtaacaaaggcccaacgaatacggactccagaaagtaaacattttctcaaaaacaaaagtattgtaatattaataatggtagtaagaattaggttgaccaaataaaatcatttttgttgcccgtcacatcatttcctcttattattttctagaaggcttaactgtcccctaagtcttctctgaaatgactttgctcctcctcaaaaaccctaagcttttttagtctcagctcttcttcc

SEQ ID NO: 187 - DNA, 3636 bp, Homo sapiens
  misc_feature: Incyte ID No: 2951807cB1
gggaattaaatcaagagcgtcgtgggaaaccggaacaaatgtatgtgtcttcagaacacaaaggccgaagagtcacagctctctgctgggatacagctattcttagagtttttgtaggtgatcatgctgggaaggtttctgctatcaaactcaatacttctaaacaagcaaaggcagctgctgcttttgtgatgtttcctgttcagacaatcacaactgttgactcctgtgttgtacagttagattatttggatggaaggctacttatatcttcacttactcgatccttcttgtgtgacactgagagagaaaagttttggaaaattggaaacaaggaaagagatggagaatatggagcttgtttctttcctggaagatgttctgggggccagcaacctctgatatattgtgctcgcccaggctctaggatgtgggaagtgaactttgatggagaagttataagtacacatcagttcaagaaactcctctcgttgccacctctccctgtgattactctaagatcagaacctcagtatgatcatacagctggatcctcccagtctttgtctttccccaaactcttacatcttagtgagcattgtgtgctgacttggacagaaagaggaatttatattttcattcctcagaatgttcaagttcttctttggagtgaagtcaaagatattcaggatgtggctgtctgtaggaatgaattgttctgtttgcacctaaatgggaaagtctcacatctctccctgatatctgtggagcgctgtgtggaacgcctgctaagaagaggcctatggaacttggctgctcgtacatgctgtcttttccaaaattctgtcattgccagcagagcaagaaaaactttgactgcagataaattggagcatttgaaatctcagctggaccatggcacctacaatgatctaatttctcaactggaagaattgatcttaaaatttgaacctttggattcagcttgtagcagtagaagaagctccatttcatcacatgaaagtttcagcatcttggactctggtatttatcgtatcattagtagtagaagaggcagtcagtcagatgaagactcttgctcccttcacagccaaaccctctcagaagatgagagatttaaagaattcacctcacagcaggaagaggacctgccagatcagtgttgtggctcacacggaaatgaagacaatgtttctcatgctccagtgatgtttgagacagataagaatgaaacttttctcccgttcggcattccattaccatttcgttctccatctcctcttgtgtctcttcaggctgtcaaagaaagtgtttctagctttgtgcgtaaaactactgagaagattggcacccttcacacgagccctgatctgaaagtgagaccagagctcaggggtgatgagcaatcatgtgaagaggatgtgagttcagatacctgcccaaaggaggaagacactgaggaggaaaaagaggtaactagtccacctccagaagaagacaggttccaggagcttaaagtagcaacagcagaagcaatgaccaagctacaggaccctctggttttatttgaatccgagtctctgagaatggttttacaggagtggctttcacatttagaaaaaacatttgccatgaaggacttttcaggtgtttcagatactgacaactcatccatgaaattgaaccaggatgtgctattagttaatgaatcaaaaaagggaatattagatgaagataatgaaaaagaaaaaagggactctttaggcaatgaagaatctgttgataaaacagcatgtgaatgtgtaaggagtccaagggagtctttggatgacctgtttcaaatatgttctccatgcgccattgcaagtggtcttcggaacgacctggctgaattgacaacattatgtttggagttgaatgtattgaattctaagatcaaaagcaccagtggacatgtggaccacactttgcaacagtactctcctgaaattctggcttgccagttcctgaagaagtacttttttctcctgaacttgaaaagagcgaaggagagtatcaagcttagttacagtaatagcccttctgtttgggatacttttattgaaggattgaaagaaatggcaagttccaatcctgtgtatatggagatggaaaaaggagatctaccaacaaggttaaagttactagatgacgaggttccttttgatagtccgttgttggttgtttatgctacccggttgtatgaaaagtttggggagtctgctcttcgatccttaatcaagttctttccatccattttgccatcggatatcatacaactttgtcatcatcatcctgctgagtttttggcctatttagacagtctggtgaaatcaaggcctgaagatcagcggtcatcttttcttgagtcccttctgcaaccagagtctttaaggttggattggctgcttttggcagtgtcccttgatgctccaccaagcaccagcacaatggatgatgaaggttatcccaggcctcattcacacttgctttcctggggttacagtcagctgatccttcatctaattaaacttcctgcagattttataaccaaagagaaaatgacagacatctgcaggtcttgtggtttctggcctggatatctaattctctgtttggagctggagagaagaagagaggccttcaccaatattgtgtatctgaatgatatgagcctgatggaaggggacaatggttggatcccagagaccgtggaggaatggaagcttctccttcatctcatacagagcaagagcacgaggccagccccccaggagtcactaaatgggagcctcagtgatgggccttcccccatcaatgtggagaatgtggcacttctgttagctaaggccatgggcccagatcgggcttggtcactgctacaggaatgtggtctggcccttgagttgtcagagaagtttaccagaacctgcgatatcctgaggattgctgagaaaaggcagagggccttgatacaaagcatgcttgaaaaatgcgatcggtttctctggtcccagcaggcctagtgggagaagattcagcaggatgtcatgacattttgagaaaaactaaatcatgctcctgaaccttctgaacgcatttgttattgaaggaaagacaccacccccaaatcctgccatcttattggggctacttttgtcagtgtctgtacccttggcatcggcatctgtgactctttatccatgacctcagtgtttcttaaccaaagttgtactcagcatttcttaaccaaagttgaattttgaaaagagtcagtccttgtttgctggaattagaatgttaatgtcctagtattattccgaactacagtattaactgcttgttgctagtggattagacagattcttttcttactgtggcttccatgttgggagcagaagcttttcatcctggtcacatgaagacagatggtattattgactggagttgaattatttttatatcttgtctggcacaatatggaaattaatgaaataagacggtgtataatggaattaacacccaaaataagtagaacactgaagatttgaatttgatatttaagtaaaatgggac

SEQ ID NO: 188 - DNA, 434 bp, Homo sapiens
  misc_feature: Incyte ID No: 482452.13
cccccgatatctcttgggcgtcctcaatgcaggaaaagcagatctgcaaagacaaggaaaccccacctccattggctcaattgttttggcaataatagtgccttccttgctccttttgctatgccttgcattatggtatatgaggcgccggtcatatcagaatatcccatgagccatcatcatgtctcctctcccattcgcaataagtaccaagaagcccaagatatcagcccaaaagtcaatcttatcatatttcaaatgattttcaaatttgatgaaatcagagttttcatgtattttaaaataaattattatttaaacatcagcaaaaaagtacttaaaactgtaaatttattatgagactgtactaacagtgtgattcaccctgattttacacacattaaaatgttagaaaaaatgtgtctcaaataatg

SEQ ID NO: 189 - DNA, 652 bp, Homo sapiens
  misc_feature: Incyte ID No: 2513610cB1
ccagcgtccgcacagcgtccgcgaccgtggtttctggtgttttaagatgcctgagccagccaagtctgctcccgccccgaagaagggctccaagaaggcagtgaccaaagcgcagaagaaagatggcaagaagcgcaagcgcagccgcaaggagagttactctgtgtacgtgtacaaggtgctgaaacaggtccatcccgacactggcatctcttccaaggccatgggcatcatgaattctttcgttaacgacatatttgagcgcatcgcgggcgaggcttcccgcctggcgcattacaacaagcgctcgaccatcacctccagggagatccagacggccgtgcgcctgctgcttcccggagagctggccaagcacgccgtgtcggagggcaccaaggccgtcaccaagtacaccagctccaagtaaacattccaaggggagacaacagcttttagacatatcttttccaacagtcgtcactgctgtgacactgtttcatcttgcaaataaaccaatggaaatgagtggtcctagaagaagattaatggaggtattttggaccacacagaaggcaaattacaccctgctgagaaaattacgcttttttctatgcgtaaaacattaaaaatctccattgaatttttggcctta

SEQ ID NO: 190 - DNA, 1542 bp, Homo sapiens
  misc_feature: Incyte ID No: 1376812.4
  unsure 571, 590: a, t, c, g, or other
tgctgagtctgtgaggtgcctatgccgagaatagctcgaggaaattggagccccagctgttaaaagagcagagggcagggtgagggccgtggcctctcaggggtatctggaaggctcttcgagttgagtgcagacccagcctgggctggaaaatggacaaaggtcatcttgctggggtgaaaagggggagagcagaaccaagaagaagagggtgagggctggggggctccagggcactggttaggaattgtggggaatgaaggctttctttagtctcatccccctgtggtaccatcttgtcctcagaggtggtttgtgctccccctactgcctatatcgacttcgcccggcagaagctagatcccaagattgctgtggctgcgcagaactgctacaaagtgactaatggggcttttactggggagatcagccctggcatgatcaaagactgcggaccacgtgggtggtcctggggcactcagagagaaggcatgtctttggggagtcagatgaggttagtagccaagagagaagataagggatgtctttttccaagaaaggatgtctcacncaagtctgtttctcaacangctgattgggcagaaagtggcccatgctctggcagagggactcggagtaatcgcctgcattggggagaagctagatgaaagggaagctggcatcactgagaaggttgttttcgagcagacaaaggtcatcgcagataacgtgaaggactggagcaaggtcgtcctggcctatgagcctgtgtgggccattggtactggcaagactgcaacaccccaacaggcccaggaagtacacgagaagctccgaggatggctgaagtccaacgtctctgatgcggtggctcagagcacccgtatcatttatggaggctctgtgactggggcaacctgcaaggagctggccagccagcctgatgtggatggcttccttgtgggtggtgcttccctcaagcccgaattcgtggacatcatcaatgccaaacaatgagccccatccatcttccctacccttcctgccaagccagggactaagcagcccagaagcccagtaactgccctttccctgcatatgcttctgatggtgtcatctgctccttcctgtggcctcatccaaactgtatcttcctttactgtttatatcttcaccctgtaatggttgggaccaggccaatcccttctccacttactataatggttggaactaaacgtcaccaaggtggcttctccttggctgagagatggaaggcgtggtgggatttgctcctgggttccctaggccctagtgagggcagaagagaaaccatcctctcccttcttacaccgtgaggccaagatcccctcagaaggcaggagtgctgccctctcccatggtgcccgtgcctctgtgctgtgtatgtgaaccacccatgtgagggaataaacctggcactaggtcttgtggtttgtctgccttcactggacttgcccagataatcttcctttttgaggcagctatataaatgatcatttgtgc

SEQ ID NO: 191 - DNA, 1038 bp, Homo sapiens
  misc_feature: Incyte ID No: 1446355.3
aagcgtgggcgagcggtgttctgcaaaatgggctctccggcagcggatctgcgcagaagcgttccgtgcgtgcaagtgctgcgaaccacgtgggtcccgggcgcgtttcgggtgctggcggctgcagccggagttcaaacctaagcagctggaaggaaccatggccaactgtgagcgtaccttcattgcgatcaaaccagatggggtccagcggggtcttgtgggagagattatcaagcgttttgagcagaaaggattccgccttgttggtctgaaattcatgcaagcttccgaagatcttctcaaggaacactacgttgacctgaaggaccgtccattctttgccggcctggtgaaatacatgcactcagggccggtagttgccatggtctgggaggggctgaatgtggtgaagacgggccgagtcatgctcggggagaccaaccctgcagactccaagcctgggaccatccgtggagacttctgcatacaagttggcaggaacattatacatggcagtgattctgtggagagtgcagagaaggagatcggcttgtggtttcaccctgaggaactggtagattacacgagctgtgctcagaactggatctatgaatgacaggagggcagaccacattgcttttcacatccatttcccctccttcccatgggcagaggaccaggctgtaggaaatctagttatttacaggaacttcatcataatttggagggaagctcttggagctgtgagttctccctgtacagtgttaccatccccgaccatctgattaaaatgcttcctcccagcataggattcattgagttggttacttcatattgttgcattgcttttttttccttcttttcatgtacactgaataacctgacctaatagagagtgtaaatactataaaaatgatttattttgagatctcacatacacacaggcattctttgcctgcccttcttaacccccgcatcccttccactcttggcactgagctattcaacaggcatctatggagcatgtgctacgtg

SEQ ID NO: 192 - DNA, 1222 bp, Homo sapiens
  misc_feature: Incyte ID No: 1446355.2
  unsure 60: a, t, c, g, or other
gtcaggcgcgacgacagggctgtgcttgatttgtgtctgtcgagagcagtgccgggccgnagttggcgctctgtaagtgcttgctgaataaatgacgggtgtgtgtgtcattcattcagcaagcgctgagtgcttactgttgtgtcaccgggaccgatgtggagggacatttttagggtgtatttctggcgctttagtcctgttttctcctgggcaatttatgcttgccccgcaccccatcgtgcgattctccgcagtctttgggctttgtctctctctttttttttttttttgggaagttgcagaatgggtgataaatgattttctttgctcctattgactgctagggccctgtggctaggtaccatagagtctctacacaggagtaaatcagcctggtgtgcaggggaggcagacacacaaacagaaaattggactacagtgctaagatgctgtaagaagaggttaactaaaggacaggaagatggggccaagagatggtgctactgtctactttagggatcgtctttcaaggcgaggggcctcctatctcaagctgtgatacaggaaccatggccaactgtgagcgtaccttcattgcgatcaaaccagatggggtccagcggggtcttgtgggagagattatcaagcgttttgagcagaaaggattccgccttgttggtctgaaattcatgcaagcttccgaagatcttctcaaggaacactacgttgacctgaaggaccgtccattctttgccggcctggtgaaatacatgcactcagggccggtagttgccatggtctgggaggggctgaatgtggtgaagacgggccgagtcatgctcggggagaccaaccctgcagactccaagcctgggaccatccgtggagacttctgcatacaagttggcaggaacattatacatggcagtgattctgtggagagtgcagagaaggagatcggcttgtggtttcaccctgaggaactggtagattacacgagctgtgctcagaactggatctatgaatgacaggagggcagaccacattgcttttcacatccatttcccctccttcccatgggcagaggaccaggctgtaggaaatctagttatttacaggaacttcatcataatttggagggaagctcttggagctgtgagttctccctgtacagtgttaccatccccgaccatctgattaaaatgcttcctcccagcat

SEQ ID NO: 193 - DNA, 1623 bp, Homo sapiens
  misc_feature: Incyte ID No: 365121.1
cttacctcgactcttagcttgtcggggacggtaaccgggacccggtgtctgctcctgtcgccttcgcctcctaatccctagccactatgcgtgagtgcatctccatccacgttggccaggctggtgtccagattggcaatgcctgctgggagctctactgcctggaacacggcatccagcccgatggccagatgccaagtgacaagaccattgggggaggagatgactccttcaacaccttcttcagtgagacgggcgctggcaagcacgtgccccgggctgtgtttgtagacttggaacccacagtcattgatgaagttcgcactggcacctaccgccagctcttccaccctgagcagctcatcacaggcaaggaagatgctgccaataactatgcccgagggcactacaccattggcaaggagatcattgaccttgtgttggaccgaattcgcaagctggctgaccagtgcaccggtcttcagggcttcttggttttccacagctttggtgggggaactggttctgggttcacctccctgctcatggaacgtctctcagttgattatggcaagaagtccaagctggagttctccatttacccagcaccccaggtttccacagctgtagttgagccctacaactccatcctcaccacccacaccaccctggagcactctgattgtgccttcatggtagacaatgaggccatctatgacatctgtcgtagaaacctcgatatcgagcgcccaacctacactaaccttaaccgccttattagccagattgtgtcctccatcactgcttccctgagatttgatggagccctgaatgttgacctgacagaattccagaccaacctggtgccctacccccgcatccacttccctctggccacatatgcccctgtcatctctgctgagaaagcctaccatgaacagctttctgtagcagagatcaccaatgcttgctttgagccagccaaccagatggtgaaatgtgaccctcgccatggtaaatacatggcttgctgcctgttgtaccgtggtgacgtggttcccaaagatgtcaatgctgccattgccaccatcaaaaccaagcgcagcatccagtttgtggattggtgccccactggcttcaaggttggcatcaactaccagcctcccactgtggtgcctggtggagacctggccaaggtacagagagctgtgtgcatgctgagcaacaccacagccattgctgaggcctgggctcgcctggaccacaagtttgacctgatgtatgccaagcgtgcctttgttcactggtacgtgggtgaggggatggaggaaggcgagttttcagaggcccgtgaagatatggctgcccttgagaaggattatgaggaggttggtgtggattctgttgaaggagagggtgaggaagaaggagaggaatactaattatccattccttttggccctgcagcatgtcatgctcccagaatttcagcttcagcttaactgacagacgttaaagctttctggttagattgttttcacttggtgatcatgtcttttccatgtgtacctgtaatatttttccatcatatctcaaagtaaagtcattaacatcaaaaaaata

SEQ ID NO: 194 - DNA, 389 bp, Homo sapiens
  misc_feature: Incyte ID No: 1399068.1
  unsure 124-224: a, t, c, g, or other
tagaaatttggaaatcatcaagcagaggagaacagaaagaaggccagtgcagttgaagggttttgtgaccctttatcttgggtcacaaaagagtgacccaagataaagttgaaaaggtgggagnnnnnnnnnnnnnnnnnnnnnnnnnnnnnnnnnnnnnnnnnnnnnnnnnnnnnnnnnnnnnnnnnnnnnnnnnnnnnnnnnnnnnnnnnnnnnnnnnnnnnaatcagatgtccacattaagttcagcatcactgtggtgacctctcgggagcgggggaccaccaggttgccaaaggaggggtgaaccggcccaggttggaaacagcagatcaaaactcctgtgctgatcagtagtgggattccacctgtgaatagcctgtgttgcc

SEQ ID NO: 195 - DNA, 588 bp, Homo sapiens
  misc_feature: Incyte ID No: 474395.1
caaatgctgaacgtgcagaacaagaactcttcctactttgtggagtggatccctaacaatgtgaagtcgagtgtgtgcgacatcccacccatcggcctgaagatgtcctccacattcatcggcaactcgacctccatccaggagatgttccgccgcgtcagcgagcagttcactgccatgttcaggaggaaggccttcttgcattggtacacgggtgagggcatggatgagatggagttcactgaggcagagagtaacatgaatgacctggtggccgagtaccagcagtaccaagacgccacagctgaggatgaggaggagtacgaggaggaagaagaggaagatcctgctgcctaagccatcatcccaagtgcttggtaaagatatgatgtcccttgtatcgctgctagtcagcactgagtcgtttgaggtgctcgtggtgatgttaggtactagatgggtgtcattacttatgaatgcgatgttgctgtgacagaactgcatttcctattgtactatggttgtccaagttgtcattaccatgatgtgaggtagcttaactggttgttgctataccttatgcagcat

SEQ ID NO: 196 - DNA, 425 bp, Homo sapiens
  misc_feature: Incyte ID No: 001300.10
taatcacttggttggaggcaccagcgtctgggtttgtgttgaccgttttggcggtgagctcacatgtcttgtgcatttgtagacgcattacgcggtccaggacaccaaaggcttccacacagaggaggatatcggcggacttcacgccaccatcgagtgtgagcagccccagcccgacctctacaagtaagcgggagctttgggttctttagaaacggttttttatgccctcaacattgctcttgctttttcaccccaagtagtccagccatgtggtggtttggaaagagaatgtaaatcactgcttaaagattaagactgagtcaaaaatacattacttatttattctcatagacttgtaccactcagatttgtagctttttctacaaatatttgaagtggcttcgtggaaccatatttgtggg

SEQ ID NO: 197 - DNA, 294 bp, Homo sapiens
  misc_feature: Incyte ID No: 482193.2
tcccgcgcttgcgcactgcaggctcgagggaagcggctgaagcgctctgtcggctgtaagcgcgcctgcgcccgcgggctcggagactgcctgagtgcgcttgcgcaagttacagcctcccccgcccccccaagcgctgtattcacagctgaggcctttgagcaaaaagctgagcaaaaacagggctgaaggctgaatgggtgcaacgacagtgaggggtgaggcggctgaaataatgagtcaaatttttcaacagctcttgtgataaaaataaatacttttattggtctggtt

SEQ ID NO: 198 - DNA, 569 bp, Homo sapiens
  misc_feature: Incyte ID No: 450887.1
cgtcggttcacttctccaggaaagggttcgtactcatggcgccgccgcagccaaagtcgggcctcttcgttggcatcaacaagggtcatgtcgtcaccaagcgcgagctgcctccccgcccgtgccaccgcaaggggaaatcaacgaagagggtgtctatggtcaggggcctgatcagagaggttgctgggtttgctccttatgagaagcgtatcactgagcttctgaaggttggcaaggacaagcgtgccctgaagcttgctaagagaaagcttggaactcacaagagggcaaagaagaagagagaggagatggcgggcgtcctcaggaagatgaggtcggctggtacgcacactgacaaaaagaaatagagagcatttcaagttcatggagctggctgccagagattatgttccagtgtctgattttccatacatgtagaacctaatagacatgtcaaagtattatgtatcgaaccagctcatgggattttgctccttccaatgcatccagggtttatgtatcgaaccaatttatgggatcttgctcttattctaatgcatccatgg

SEQ ID NO: 199 - DNA, 7814 bp, Homo sapiens
  misc_feature: Incyte ID No: 1281959cB1
cgacgcacccacgcccctcaccccccgagagccgaaaatggacccaagtggggtcaaagtgctggaaacagcagaggacatccaggagaggcggcagcaggtcctagaccgataccaccgcttcaaggaactctcaacccttaggcgtcagaagctggaagattcctatcgattccagttctttcaaagagatgctgaagagctggagaaatggatacaggaaaaacttcagattgcatctgatgagaattataaagacccaaccaacttgcagggaaagcttcagaagcatcaagcatttgaagctgaagtgcaggccaactcaggagccattgttaagctggatgaaactggaaacctgatgatctcagaagggcattttgcatctgaaaccatacggacccgtttgatggagctgcaccgccagtgggaattacttttggagaagatgcgagaaaaaggaatcaaactgctgcaggcccagaagttggtgcagtacttacgagaatgtgaggacgtgatggactggatcaatgacaaggaagcaattgttacttctgaagagctgggccaggatctggagcatgtagaggttttacagaagaaatttgaagagtttcaaacagatatggctgctcatgaagaaagagttaatgaagtgaaccagtttgctgccaaactcatacaggagcagcaccctgaggaggaactgatcaagactaagcaggatgaagtcaatgcagcctggcagcggctgaagggcctggctctgcagaggcaggggaagctctttggggcagcagaagttcagcgctttaacagggatgtggatgagactatcagttggattaaggaaaaggagcagttaatggcctctgatgattttggccgagacctggcaagtgttcaggctctgcttcggaagcacgagggtctggagagagatcttgctgctctagaagacaaggtcaaagccctgtgtgctgaggctgaccgcctgcaacagtcccaccctctgagtgcaacacagattcaagtgaagcgagaggaactgattacaaactgggagcagatccgcaccttggcggcagagagacatgcacggctcaatgattcatacaggcttcaacgcttccttgctgacttccgtgacctcaccagctgggtgactgagatgaaagccctcatcaatgcagatgagcttgccagtgatgtggctggggctgaagccctgctagatagacaccaagagcacaagggtgaaattgatgcccatgaagacagcttcaaatctgcagatgaatctggacaggcactgcttgctgctggtcactatgcctcagatgaagtgagggagaagctgaccgtcctttccgaggagagagcggcgctgctggagctgtgggagctgcgcaggcagcagtacgagcagtgcatggacctgcagctcttctaccgggacactgagcaggtggacaactggatgagcaagcaggaggcgttcctgttgaatgaagacttgggagattccttggatagtgtggaagcgcttcttaagaagcacgaagactttgagaaatcccttagtgcccaggaggaaaagattacagcattagatgaatttgcaaccaagctaattcagaacaaccactatgcaatggaagatgtggccactcgccgagatgctctgttgagccgccgcaatgcccttcacgagagagccatgcgtcgccgggcccagctagccgattctttccatctgcagcagtttttccgtgattctgatgagctcaagagttgggtcaatgagaagatgaaaactgccacagatgaagcttataaagatccatccaacctacaaggaaaagtacagaagcatcaggcttttgaggctgagctctcagcaaaccagagccgaattgatgccttggagaaagctggccaaaagctgattgatgtcaaccactatgccaaggatgaagtggcagctcgtatgaatgaggtgatcagtttgtggaagaaactgctagaggccactgaactgaaaggaataaagcttcgtgaagccaaccagcaacagcaatttaatcgcaatgttgaggatattgaattgtggctatatgaagtagaaggtcacttggcttcggatgattacggcaaagatcttaccaatgtgcagaacctccagaagaaacatgccctgctagaggcagatgtggctgctcaccaggaccgaattgatggcatcaccattcaggcccgccagttccaagatgctggccattttgatgcagaaaacatcaagaagaaacaggaagccctcgtggctcgctatgaggcactcaaggagcccatggttgcccggaagcagaagctggccgattctctgcggttgcagcagctcttccgggatgttgaggatgaggagacgtggattcgagagaaagagcccattgccgcatctaccaacagaggtaaggatttaattggggtccagaatctgctaaagaaacatcaagccttacaagcaggaaatttcttgggccatgaaccacgcatcaaagcagttacacagaaggggaatgccatggtggaggaaggccattttgctgcagaggatgtgaaggccaagcttcacgagctgaaccaaaagtgggaggcactgaaagccaaagcttcccagcgtcggcaggacctggaggactctctgcaggcccagcagtactttgctgatgctaacgaggctgaatcctggatgcgggagaaggaacccattgtgggcagcactgactatggcaaggacgaagactctgctgaggctctactgaagaaacacgaagctttgatgtcagatctcagtgcctacggcagcagcatccaggctttgcgagaacaagcacagtcctgccggcaacaagtggcccccacggatgatgagactgggaaggagctggtcttggctctctacgactatcaggagaagagtccccgagaggtcaccatgaagaagggagatatccttaccttactcaacagcaccaacaaggattggtggaaagtggaagtgaacgatcgtcagggttttgtgccggctgcgtacgtgaagaaattggaccccgcccagtcagcctcccgggagaatctcctggaggagcaaggcagcatagcactgcggcaggagcagattgacaatcagacacgcataactaaggaggccggcagtgtatctctgcgtatgaagcaggtggaagaactatatcattctctgctggaactgggtgagaagcgtaaaggcatgttggagaagagttgcaagaagtttatgttgttccgtgaagcgaatgaactacagcaatggatcaatgagaaggaagccgctctgacaagtgaggaggtcggagcagacttggagcaggttgaggtgctccagaagaagtttgatgacttccagaaggacctgaaggccaatgagtcacggttgaaggacattaacaaggtagctgaagacctggagtctgaaggtcttatggcagaggaggtgcaggctgtgcaacaacaggaagtgtatggcatgatgcccagggatgaaactgattccaagacagcctccccgtggaagtctgctcgtctgatggttcacaccgtggccacctttaattccatcaaggagctgaatgagcgctggcggtccctacagcagctggccgaggaacggagccagctcttgggcagcgcccatgaagtacagaggttccacagagatgctgatgaaaccaaagaatggattgaagagaagaatcaagctctaaacacagacaattatggacatgatctcgccagtgtccaggccctgcaacgcaagcatgagggcttcgagagggaccttgcggctctcggtgacaaggtaaactcccttggtgaaacagcagagcgcctgatccagtcccatcccgagtcagcagaagacctgcaggaaaagtgcacagagttaaaccaggcctggagcagcctggggaaacgtgcagatcagcgcaaggcaaagttgggtgactcccacgacctgcagcgcttccttagcgatttccgggacctcatgtcttggatcaatggaatacgggggttggtgtcctcagatgagctagccaaggatgtcaccggagctgaggcattgctggagcgacaccaggaacaccggacagaaatcgatgccagggctggcactttccaggcatttgagcagtttggacagcagctgttggctcacggacactatgccagccctgagatcaagcagaaacttgatattcttgaccaggagcgtgcagacctggagaaggcctgggttcagcgcaggatgatgctggatcagtgccttgaactgcagctgttccatcgggactgtgagcaagctgagaactggatggctgcccgggaggccttcttgaataccgaagacaaaggagactcactggacagcgtagaggctctgatcaaaaaacatgaagactttgacaaagcgattaacgtccaggaagagaagattgctgctctgcaggcctttgccgaccagctcatcgctgccggccattatgccaagggagacatttctagccggcgcaatgaggtcttggacaggtggcgacgtctgaaagcccagatgattgagaaaaggtcaaagctaggagaatctcaaaccctccaacagttcagccgggatgtggatgagattgaggcttggatcagtgaaaaattgcaaacagcgagtgatgagtcgtacaaggatcccaccaacatccagctttccaagctgctgagcaagcaccagaagcaccaggcttttgaagcagagctgcatgccaacgctgaccggatccgtggggttatcgacatgggcaactccctcattgaacgtggagcctgtgccggcagtgaggatgctgtcaaggcccgcctggctgccttagctgaccagtggcagttcttggtgcaaaagtcagcggaaaagagccagaaactgaaagaagccaacaagcagcagaacttcaacacagggatcaaggactttgacttctggctgtctgaggtggaggccctgctggcatccgaagattatggcaaagacctggcttctgtgaacaacctgctgaaaaagcatcaactgctggaagcagatatatctgcccatgaggatcgcctgaaggacctgaacagccaggcagacagcctgatgaccagcagtgccttcgacacctcccaagtaaaggacaagagggacaccatcaacgggcgcttccagaagatcaagagcatggcggcctcccggcgagccaagctgaatgaatcccatcgcctgcaccagttcttccgggacatggatgacgaggagtcctggatcaaggagaagaagctgctggtgggctcagaggactacggccgggacctaactggcgtgcagaacctgaggaagaagcacaagcggctggaagcagaactggctgcgcatgagccggctattcagggtgtcctggacactggcaagaagctgtccgatgacaacaccatcgggaaagaggagatccagcagcggctggcgcagtttgtggagcactggaaagagctgaagcagctggcagctgcccggggtcagcggctggaagagtccttggaatatcagcagtttgtagccaatgtggaagaggaagaagcctggatcaatgagaaaatgaccctggtggccagcgaagattatggcgacactcttgccgccatccagggcttactgaagaaacatgaagcttttgagacagacttcaccgtccacaaggatcgcgtgaatgatgtctgcaccaatggacaagacctcattaagaagaacaatcaccatgaggagaacatctcttcaaagatgaagggcctgaacgggaaagtgtcagacctggagaaagctgcagcccagagaaaggcgaacgtggatgagaactcggccttccttcagttcaactggaaggcggacgtggtggagtcctggatcggtgaaaaggagaacagcttgaagacagatgattatggccgagacctgtcttctgtgcagacgctcctcaccaaacaggaaacttttgacgctgggctgcaggccttccagcaggaaggcattgccaacatcactgccctcaaagatcagcttctcgccgccaaacacgttcagtccaaggccatcgaggcccggcacgcctccctcatgaagaggtggagccagcttctggccaactcagccgcccgcaagaagaagcttctggaggctcagagtcacttccgcaaggtggaggacctcttcctgaccttcgccaaaaaggcttctgccttcaacagctggtttgaaaatgcagaggaggacttaacagaccccgtgcgctgcaactccttggaagaaatcaaagctttgcgcgaggcccacgacgccttccgctcctccctcagctctgcccaggctgacttcaaccagctggccgagctggaccgccagatcaagagcttccgcgtagcctccaacccctacacctggtttaccatggaggccctggaggagacctggaggaacctacagaaaatcatcaaggagagggagctggagctgcagaaggaacagcggcggcaggaggagaacgacaagctgcgccaggagtttgcccagcacgccaacgccttccaccagtggatccaagagaccaggacatacctcctcgatgggtcctgtatggtggaagagtcggggaccctcgaatcccagcttgaagctaccaaacgcaagcaccaggaaatccgagccatgagaagtcagctcaaaaagatcgaggacctgggggccgccatggaggaggccctcatcctggacaacaagtacacggagcacagcaccgtgggcctcgcccagcagtgggaccagctggaccagctgggcatgcgcatgcagcacaacctggagcagcagatccaggccaggaacacaacaggtgtgactgaggaggccctcaaagaattcagcatgatgtttaaacactttgacaaggacaagtctggcaggctgaaccatcaggagttcaaatcttgcctgcgctccctgggctatgacctgcccatggtggaggaaggggaacctgaccctgagttcgaggcaatcctggacacggtggatccgaacagagatggccatgtctccttgcaagaatacatggctttcatgatcagccgcgaaactgagaacgtcaagtccagcgaggagattgagagcgccttccgggccctcagctcagagggaaagccttacgtgaccaaggaggagctctaccagaacctgacccgggaacaagccgactactgcgtctcccacatgaagccctacgtggacggcaagggccgcgagctccccaccgcgttcgactacgtggagttcacccgctcgcttttcgtgaactgagccactccctgggtcacccacccctcgctgcttgccctgcgtcgccttgctgcatgtccgctcctctgtgtgctctcactttccactgtaaccttaagcctgcttagcttggaataagacttaggagaaaatggtgcttcactaacccgcttccggtccagtcacaatcatcatgtcactgtggggacccagatctgtgtcttgaagcagctgccctcattccgacttcagaaaatcgaagcagctggctcctccccttgttctctctcccaccctcccccaaatctgttttcatgtaaaagacaaataaatgatgacttcccccaaaaaaaaaaaaaaa

SEQ ID NO: 200 - DNA, 6350 bp, Homo sapiens
  misc_feature: Incyte ID No: 197856.4
ctaggtttggctgccgccttctagccgggcgttcgcggccccgccggcccgactctcaagcctcagctcccaggctaggctgtggccgccggtggcctggggagagtgcggcgccatgcctcgggcttaatgcgcccccccctcttctcccagtcttcagtcttaagtcgttagcctcctccctccgctttcagcagtggtctttcagctctcttcttgtgcgctgttgtcgaccccgaccagccccttccaacccagtcatcatgtcccagccgggaataccggcctccggcggcgccccagccagcctccaggcccagaacggagccgccttggcctcggggtctccctacaccaacggtcctgtccaaaatgcattgctgtcttcacaagagtcagtgagccaaggatacaatttccagcttccaggatcctaccctcatccaataccagcaaagactttgatccagtctctggccagtctaactatggtggttctcagggatctgggcagactcttaatagaccacctgtggcctctaatccagtgacaccttcgcttcatagtggtcctgctccccgaatgccattacctgcttctcagaacccagctactacaccaatgccttctagtagctttcttcctgaagccaacctgccaccacctttgaattggcaatataactatccatccacagcctcacaaacaaaccattgtcctcgtgcatcatcccaaccaactgtatctggaaatacaagtttaaccacaaatcatcaatatgtttcttctggatatccttcacttcaaaatagcttcataaagtcaggtccttctgtacctcccttagtgaatccacctctgcctacaacttttcaaccaggagctcctcatgggccccctccagctggaggcccacccccagtgagggccctcacgcccctgacatcatcatatagagatgtaccccagcccttatttaattcagctgtcaaccaagaaggtattacatcaaataccaataacggatctatggtggtccacagtagttacgacgagattgaaggaggtggcttattggcaacaccacagcttactaacaagaatcccaaaatgagccgaagtgttggatattcatatccctccttaccacctggttatcagaacacaacaccacctggtgcaactggagtaccaccctcttccttgaattacccaagtgggccacaagcctttactcagactcccttaggtgctaatcatttaaccacaagcatgagtggattaagtctacaaccagagggtctaagagttgtcaatcttcttcaagaaagaaacatgcttccgtcaacacctttgaagcctccagttccaaatttgcatgaagacatccagaaactcaactgtaacccagagttatttcgatgcacgctgactagcattcctcagacgcaggccttattgaataaagccaaacttcctttggggctgctgcttcatcctttcaaagacttagtgcaattgcctgtggttacctccagtacaattgtgagatgccgttcatgcaggacgtacatcaatcctttcgtcagctttcttgatcaaaggagatggaagtgtaacttatgttatcgagtcaatgatgttcctgaagaattcttgtacaaccctttgaccagagtttatggagaacctcacagaagaccagaagttcaaaatgctactattgagtttatggctccttcagaatacatgttacgaccacctcagcctccagtgtatctctttgtatttgatgtgtctcacaatgcagtcgaaactggatacttgaattcagtttgccagagtttgttagacaatctggatttgcttcctggcaacactagaacaaaaattggcttcataacatttgacagtacaatccatttctacggtcttcaggaaagtctctctcaacctcagatgctaatagtttcagatattgaagatgtttttatacctatgccagagaacttattagtaaacttaaatgaaagtaaagagctcgtgcaagatttactgaaaactttgccacaaatgtttaccaagactctggagacccagagtgccttgggtcctgcactgcaggctgcctttaagctgatgtctccaactggtggtcgaatgtctgtctttcaaacacaactcccaactcttggagtgggagccctgaaaccacgagaggaaccaaaccacaggtcatctgctaaggatatacacatgacaccatccactgacttctataagaaattagccttggactgttctggtcagcaagttgctgttgacttattccttctcagtggacagtattctgatttggcttctctgggttgtatttctcggtattcagcaggtagtgtctattactatccctcttaccatcatcagcacaacccagtccaagtacagaaattacagaaggaactacagagataccttactcggaagattggctttgaggcagtcatgaggattcggtgcaccaaaggtctttccattcatactttccatggaaacttctttgttaggtcaaccgacttactgtctttgcctaacgtcaacccagacgctgggtatgcagtacagatgtcagtggaagagagtcttactgacactcagttggtttcttttcagtcagcactcttgtatacatccagcaaaggcgaaagaagaattcgtgttcatactttgtgtttgccagtagtttcgactctgaatgatgtctttcttggagctgatgttcaagcaatttcagggttattggccaatatggctgttgacagatctatgactgccagtctgagtgacgctcgggatgctctagtgaatgcagtcattgactccctttcagcttaccgttcttcagtcttaagtaaccagcagcctggactcatggttcctttttctttgcggcttttcccactttttgtgttggctctccttaaacagaaatcattccagactgggacaaatgcacgtctagatgaacgcatttttgctatgtgtcaagtgaaaaaccagcccttggtttaccttatgctcacaactcatcccagtttgtatagagttgacaatctctcagatgagggagcactcaacatcagtgatagaaccatacctcagccccccattcttcagctttcagtggagaagctgagcagagatggagctttcctcatggatgcaggctctgtactgatgctttgggttggaaaaaattgtacacagaattttctcagccaagttctaggagttcaaaactatgcatcaattccacagcctatgacagaccttccagaacttgatacaccagaatctgccagaataatagctttcatctcttggcttagagagcagagaccatttttcccaatactttatgtaataagggatgagagtccaatgaaagcaaacttccttcaaaacatgatagaagacagaacagaatctgcattatcatattatgaattcctgttgcatatacagcaacaagtgaataaatgaatgaatgaagaaatttgacttatttttaaggaatgtcacgatagtgcagaatacctggaaatgtgtaataccttctttttctattatgtttgtggactaatgtgatgattgagatgttctcactgtgatttcaacaacctatagcaaataaaagaccacagcagagaatcaaacatgcaactctgaaatactgtatttttcaaatcagaatatagctacgtatgattggatacttttttcttgccaattatgtttgagttgttatggattaaaataagaatattgcagaggcaaagtacattttgtaaaataaagatttctgtgttctacatgtatatttctcatttttaatttttctgaatctttggctgctacatttaaaacctcacaaacctaagtgttgcagggaagttacaaattgattggtagtgatgtttttaaaataaaaacaatggaaagtaaatataatgtaggaaaactagaattcattccccacacgtgtcttttttttttctttgttaagggaaaggatcatgttgactaaaactagagtaaactaattctagtatagcttgagaaaaatatgaagaaacacattcaagctttaaaatctgtcagtattctttatgcttgaagaacaaagtcactttgatttgaagtgagaactatcattaggtggttttctgatttcctgatgaagagtggacatactgtcttaatctatagtgaaaagaatttgagctgtcttcataaacactgggactagcaatgataatagggagataagaaactttaattatcttgatcctttaagtggattttatttggtgcatttctgctctgggtatataataaaagtgggggtttttggtgaaatgagtgaagaaatgaaaggtttctaaagtgctatccaaatacatcagtaacatttttctaaggagtttaattgttaaattggaagtcattcataagaaatatttatgcttgaatatgaaaatctatgaaagcataaatgctgctgtttgatttggtggatattaagattatacacatccaacatattaaagttatgaaagaaacttgacttctgaaaatccttaagagactgctttcttgattcagctagagaaatattatagtcaaaactattgagtgaattttgtttacaaataggtaaattatacatttgtatatttaaagtgctgtgacatagtatctttaagagtttggctcagttttcacagattcattttgtcttaagaatttcttaaatatgttcatgtataatacttgatcaaaatatttttgggttttttgttttgttttaatgggttagaaaatgtttacaatcttggtcttatatgatcaccaatggaatagtaacttccaggtttatatcaatatgagctgactttaactgagttgtttgggatagggaagaagcagtccctctacagtatacaactactgcttgccagctggatcaaaataatcatgttttatgaaaatatctcccttaagcagtgttaaggttggtttgcagtgtgtaagtggcacattgaactggaagttttcttgaaagctgcttcatctattaagaagcaattttcaaattgtagcgaattatattatcccctcttttaaagaaacagtcgttatatgctgatgtttcttaaaataactaaaatgttcctcttaatgtgattttaaatggagttatttgtaggtcctttcttagtagtaaagaatcttctagagggaaacatttgtgcttttagggataatcttccttgtgcctcactacatccctaagtgggtatgactcttgttattaccacatgcttttttagtatatttcacaaatttacttttaaatattattttagatacggtgtaacatgtgcaattcagaataattttataacaggtcatgaaaaacataactttagttaggattcacaatatttgttctccacataatgagagaatgaatgagcctttggagatactgatataaggcaattattttttgcaatgttgaatgtgttttttagtttgattctttttttttcccccaatagggcactacctgccatatcatcttgtattactttttgatgtaaagcgactaatatttacactatgccatattttttttaattatagttgtaaattatgaaagatccttgaattttctacagatctacaactactaatgtaacagacaagggcaatcttggtatttaaatctgagcatggcagttctaccataaaaagtactctatttttctaatttctaggatttttaaaataacatttctgtaagtctgacatactaatagtcactcaagcagtaccatttattttagtttgcatatattttcactgtttttaatttaatgtattgagtctaatagactgttttgcaataattagaataaagatttatttcttctaatcaaagatgcataacagctattatctaggggaccaccaaatgtgatttcaaaattttgttaactattacaaatgtaatccttatatagaaattttaattttgtaaagtagtgtataatattgtaatattaaattcttgttcttaaattcaaatatgtattgatcttcaatgtgctgtgttaaatcttgcttctctgaaaagttggagacaagatttgtcttcctttttacagtttgtaattttcactgttttattcctgtcaaaaaaaaaaaaaagtcatttgtaacccatgcagaccattgtttgatctatgctaacttatcaacttggctattcaataaagttaac

SEQ ID NO: 201 - DNA, 1008 bp, Homo sapiens
  misc_feature: Incyte ID No: 197856.9
cagaagttcaaaatgctactattgagtttatggctccttcagaatacatgttacgaccacctcagcctccagtgtatctctttgtatttgatgtgtctcacaatgcagtcgaaactggatacttgaattcagtttgccagagtttgttagacaatctggatttgcttcctggcaacactagaacaaaaattggcttcataacatttgacagtacaatccatttctacggtcttcaggaaagtctctctcaacctcagatgctaatagtttcagatattgaagatgtttttatacctatgccagagaacttattagtaaacttaaatgaaagtaaagagagtgtcattggggtcagttcagaagaaactcttattacctgcctggaaattgccatgagataatacagtgagaggtgaacagaatgtgtctgaaggggggatgttgtctaccctgtacatgcatatatgccgtaggggtaacattttaactagcaagtctatggtctctgctgttggcaatggtgactgtgccatagtgcgaagtatttttttccccattaactctatttgtacaacctaacctgtaaaggtagttgtttttcttttgtagtgatattactagttggcaaagttactggatatcttagatttgcaacagggaagagctaaactcgctttggaacttacaagaataaagtatgtagaggtgatggagaaggccatatttcatggcattaaaatacatcaaatctctaaactgtgatggttcttttggatacattttggacttatagtcttgctggactactgcatgtgcaagaactgtaaggcccaactttgatttgtcttgcttgccaatttataatgttgacttaaaatggctttcttgtcatttgaccaacttcattgtttagtgtctgtagattctctgaccatcatcatgactcaatgtcttgtctattgtatgagatactgacttaatgtgaaataaaattttaattatgacaaa

SEQ ID NO: 202 - DNA, 3067 bp, Homo sapiens
  misc_feature: Incyte ID No: 1088680.3
gggggttgctatgcaggttgttgtcgggataccagatttcctactccgagaggccccgggtccctctgccacaacttctgtcgctctgccgcctgcaccgtgacccgcactattcacgggagccctagagaggacaccgggacacccagaagccgggaaatgatgtttcaggattcagtggcctttgaggatgtggctgtcagcttcacccaggaggagtgggctttgctggatccttcccagaagaatctctacagggatgtgatgcaggaaaccttcaagaacctgacctctgtaggaaaaacatggaaagttcagaacattgaagatgagtacaaaaatcccaggagaaatctaagtcttatgagagagaaactctgtgaaagtaaagaaagtcatcactgtggagaaagcttcaaccagattgcagatgacatgctgaacaggaaaactcttcctggaataacaccatgtgaaagcagtgtgtgtggagaagttggcacgggtcattcatctcttaatacgcatatcagagctgacactggacacaagtcatctgagtatcaggaatatggagagaatccatatagaaataaggaatgtaagaaagccttcagttatcttgactcctttcaatcacatgataaagcttgcactaaagagaaaccctatgatggtaaagaatgtacagaaaccttcatttcccattcatgcattcaaagacacagggtaatgcacagtggagatggaccttataaatgtaagttttgtgggaaagccttctattttctcaatttatgtcttatccatgaacgaattcacactggtgtgaaaccatataagtgtaaacaatgtggtaaggcctttactcgttccactacccttccagtacatgaaagaactcacacaggagtgaatgccgatgaatgtaaagaatgtgggaatgcattcagttttcctagtgaaattcgtagacataaaaggtctcacactggagaaaaaccctatgagtgtaagcaatgtgggaaagtcttcatttctttcagttccattcagtatcataagatgactcacactggagagaaaccctatgaatgtaagcagtgtgggaaagcctttagatgtggctcacaccttcaaaagcatggaaggactcacactggagagaaaccctatgaatgtaggcaatgtggtaaagccttcagatgtacctcggaccttcaaaggcatgaaaagacacacactgaggataaaccctatggatgtaagcagtgtgggaaaggctttagatgtgcttcacaacttcaaattcatgaaaggacgcacagtggagagaaaccccatgaatgtaaggaatgtggaaaagtattcaagtatttttcttccttgcgtatacatgaaaggacgcacactggagagaagccccatgaatgtaagcaatgtggaaaagcattcaggtatttctcttccttgcatatacatgaaaggacacacactggagataagccatatgagtgtaaggtatgtggcaaagccttcacttgttccagttccattcgatatcatgaaaggactcacactggagagaaaccctatgaatgtaagcactgtggtaaggcctttatttccaattacattcgatatcatgaaaggactcacactggagagaaaccctatcaatgcaagcaatgtggcaaagcctttattcgtgccagttcatgtcgagaacatgaaagaactcataccattaatagatgagaaatccttttagtggaagcaacgggagaagctttctgttgtcccacttcctttgaaacacaagaaaagagagtggtgaaagaacctctggataactgctttttgaattgagaagagagacttgcgataggacaataaaatctagaagaacttggatggtttcgtaatacaattcacctatagccaatcttgcatgagatttcaaaggcacagaaaaggaaggcatcagtcacatattagaggccccacacagggagagaggtgtgtggctacccgcttccagcccattttcctgattctttggcttgttaatcgagaatatcccccaaatcacttgtctctgttcctcagagttgtaggtctccagatatgtccccagtgctccacattaaagataacatgcccactttgctgtttcttcagaaatgttaaaatgtttaccagagaactaataaatgttgttatggctggaaatactcactgatgcccaactcttctatagattgagttggtttaagaggtctactttgtattgcaagcattgttgtttctacggattagcgagcctgttcttgattaaaccaactagatgggagcttgttcctctgctgcattgtgcagtgattggtctcaccaagggcttttatgtgagaagagccaccttgctcttatcaggaaatttcaagcatttgctgttattcacaactgaatgtaatgtctcacttcgtttttaactttgtatgagtatacctgactaaaaacactaatgcggtttcttggcaacaaatacttctgttcatgtattttagaaataagcttattaactgtttataacaactgcatactaacaattattattttttaatgaagaagctacattacaacctcccattaacatcatgtattagatcaagttgataatgttaccatgttatccggtggtcactgtgagtcagtgttgccatgtggatgtcaggcatatttttcctcatgtagattttacttttcatgcttatattcttagtttttatctggatcatgaattttcatctattctaaatacccaaggtgatctcatgttcttatgagtgacttctgtacccaagaccaccagtggcataagtgtcgtcaaagagggtgtaataatatactgtggtaatgaatatgacccaaagccatagatgactgtgagatgtgtgagatattaaaagatagtcacatttcgtgagaagagaaaaatttggggtatgtttgccatttaaagtgttttcttctgtcacatttcaagacatggttaaagaatgaggtt

SEQ ID NO: 203 - DNA, 4638 bp, Homo sapiens
  misc_feature: Incyte ID No: 246020.6
acgcgtccggcggagggagccgggcgtcggaggccctgaggccggccgcagagcccggagattgagcggctttggggaaggggtggttaaggaagtaggcctcggcttccgtcggtcgctgctcggctctgcggcccgtttggaccgcggaggaggtcgccttcccctcccgtggggcgctcggttggactgtggaaaccggggcaacttcccccgtcttcccggctgaggcgcctgcgtgggcctcgcgacccggctcgccaacccgcctcggcccgcacgcccacctcgcctgcggaccccggaggtgcctacgcggactagtgacgccccccgcccgtcggcaactccacccggcgctgaccccctcaactctgcaggacccggcgcgcgaggaccccacgacccgcgggcgcctgcgcggaccccgcgagccccggcgcctgcgcgagtccccgacgccgcccccgcccccactcaccgggccccgcagcaggggccggagccgccggcggcggggcgggggggggcgccccgatgagccccgagtgcgaggagccgccgccccccctcgcagggcgccatgttttggaagtttgacctgcacacaagctcgcacctggacacgctgctggagcgggaggacctgagcctgcccgagctgctggacgaggaagacgtgctgcaggagtgcaaggtcgtcaaccgcaagctgctggacttcctgctgcagccaccccacctgcaagcaatggtggcctgggtcacccaggagccgccagatagcggtgaggagcggctgcgctacaagtaccccagtgtggcctgcgagattctgacctcagatgtgccccagatcaatgatgccctgggtgccgatgagtcccttctgaaccggctctacggcttcctgcagagcaccggcagcctcaacccactgctggccagcttcttcagcaaggtcatgggcatcctcatcaaccgcaagacagaccagctcgtgtcctttcttcggaagaaggatgacttcgtggacctgctgctgcagcacattggcacctcggccatcatggacctcctgctgcgcctgctcacctgtgtggagcggcctcagctgaggcaggatgttgtcaattggctcaacgaggagaagatcgtccagcggctgattgagcagatccacccgtcgaaggatgagaatcaacattccaacgcatcccagtccctgtgtgacatcatccgcctgagccgggagcagatgatccaagtccaggacagcccagagcctgaccaactgctggccaccctggagaagcaggagacgattgagcagctcttaagcaacatgttcgagggggagcagagccagtctgtcatcgtcagtgggatccaggtgctgctgaccctgctggagcccaggaggccgaggtccgagtccgtgaccgtgaacagcttcttcagcagtgtggatgggcagctggagctcctggcccagggggccctggaaagcactgtgtccagtgtgggcgccttgcacgccctacgcccgcggctcagctgcttccaccagctcctgctggagcctcccaagctggagccgctacagatgacatggggcatgctggctccgcctctgggcaacacgcggctgcacgtggtcaagctcctggccagtgccctgagcgccaatgatgcagccctgacgcacgagctcctggcactggacgtgcccaacaccatgctggacctcttcttccattatgtcttcaacaacttcttgcatgcccaagtagagggatgcgtgagcaccatgctgagcttggggccacctcctgacagcagccctgagacgcccatccaaaaccctgttgtgaaacatctgctgcagcagtgccgcctggtggagcggatcctgacgtcctgggaggagaacgaccgtgtacagtgtgcgggaggccctcggaaaggctacatgggtcacctgacaagagtggccggtgccctggtgcagaacacggagaaggggcccaatgcagagcagctgcggcagctgctgaaggagctgcccagcgagcagcaggagcagtgggaagccttcgtatcggggcccctggcggagaccaacaagaagaacatggtggacctggtgaacacccaccacctacactcctccagtgacgatgaggacgaccggctcaaggagttcaacttccctgaggaggctgtgctgcagcaggccttcatggacttccagatgcagcgcatgacctctgccttcattgaccacttcggcttcaatgatgaggagtttggggagcaggaggagagtgtgaacgcaccttttgacaagacagccaacatcaccttctccctcaatgctgacgatgagaaccccaacgccaacctacttgagatatgctacaaggaccgcatccagcagtttgatgatgatgaggaagaggaggacgaggaagaggcccagggctcaggggagtctgatggagaagatggcgcctggcagggcagccagctggccaggggggcccgtctgggccagccacctggtgtccggagtggaggcagcacagacagtgaggacgaaaagaggaggacgagaggaggaggaagacgacggaggggcattggctgtgcagcccgtggaggggccacccctctgtcctaccccagccctggccctcagcctccaggccccagctggacagccacctttgacccagtgcctacagatgccccgaccagcccccgagtctccggggaggaagagctgcacactgggcctccagccccacaggggcccctcagtgtgccccagggcctccccactcagagcctggccagccctcctgcccgtgacgccctgcagctcaggtctcaggaccccacacccccctcagcacctcaggaagccacagaaggcagcaaagtcacggagccctcagccccttgccaggccttggttagcatcggggaccttcaggccaccttccacgggatccgttctgcccccagctcctcggacagtgcaaccagagacccctctacctctgtcccagcctccggggcccaccagcccccccagaccacagaaggggagaagagcccagagcccttggggcttccccaaagccagagtgcccaggccctcacgcctcctccgatacccaatggctctgccccggaagggcctgcatccccaggctcccaatagctgcctggtgcggcagcggcggccaaatcttccgtcctcccgtggatctcccggggtgggggcagggcgggtcccacgatggcccccattgccctcatcaccctgacacccccacattctctcctctggacccccaggaggctggtgccagggagacaggcccaacccacccccatttgcactgagaagagaagttttggagcgttgcctcctagaataaagatacagagagtcaaatagagagaatggagagagagaaacatatattatatattatatagagagagggaggagagcgagagagagtgaggacaccgaactgggctggcggctccaaagcacagccttccctgttccgtcccagcgggagctggtgttaggggtcccaaggttgccacccacgtgcccagctgtcccacgctgcagcgcagacggccacgcccacacccggccttttagctcaggtccaccatgggggacggcccagcgtgggtgggggtgccagagggtcccgagtgggggccgtgcctttgcccagaccctgcactttcaaccaggccagtccggctctggggagcaggggcctccccggcaacagccccaggggccttgagggtctgaggtcccagccctgttgccaagtgaccttgtccccagctccctcctcccaggctggtgtgagtgtgcgtgcgtttgtgccgagcttctatttcatattgcaaatataaataaaggaaggcagtttacgattctgctggtcagaccttacgttctgggatgcggggtggggagcctgtattatccctgcaccccagaggctgggggtgctcctgacccagtctgcccccacactgtcctgccagagggagccctgtggctgcagaggccccaggctgggccaggcactggctgtgagggctcctgccaggtctaccccacctgtgggcagggccttgggcagaggatagaagccaccgacaggctcaaatccctgctcctgcccctgcttacccccagtaaccaagcccagcattgaggctgggtactggcgcccagtaggtctgagtctttcaggtagaaggtagaagtgtaggctgcgtgtgcagcgagtggcaccggtgagcggcgctgggaaaccggagcgtgtggaccgggccatgaggacagcgtcctcactggggtggcagcttggcttggaggtcacctgggggctcgctcagctaacaggagagggtgcttgttccccgcattcgtggtggtccctcctggtcacccattgaagcagtgtttgtggtggagcccctgagggcttggtggggttgagcagaatgaggaaaggtttcatggagcagggagggagacggctagggcagtcaagtgaaggacagactcgccttcccatccctcca

SEQ ID NO: 204 - DNA, 617 bp, Homo sapiens
  misc_feature: Incyte ID No: 1446842.1
ctcctccatggcgggcagccacgctccctccacctggctttactgcttaggcctaaaacagccgaagtctgtgcaggggccggggagtccaggccatggggtggttaggccatggctctcggtgccccctgcaagcccacctgcactgtcccctgcccctgcaacctccatggattgtgaagggctttgagggtccagctgagttagccagacagagcagggtggtcccgggttagcaacaacggactgtggcctgttctcttctcttcactgctaatgtccactgactgttttattaactcagaagctaaaagaagacgcagaaaaacttcagcaagagttcggctactcgtattttagatggtcaccaagaaaaaataggcaacttcaagattgagccgcctggcttgttccgtgcccgtggcgaccatcccaagatggggatgctgaagagaatggatcacgccagaggatgtggttactcaactgcagcagggactcgaagatccccgagcccccggcggggcaccagtggaaggaggtgcgctccgataacaccgtcacgtggctggcagcttggaccgagagcattcagaactccatcaagtacatcatgc

SEQ ID NO: 205 - DNA, 1312 bp, Homo sapiens
  misc_feature: Incyte ID No: 2580580cB1
ctgaaagaatgttgtggctgctcttttttctggtgactgccattcatgctgaactctgtcaaccaggtgcagaaaatgcttttaaagtgagacttagtatcagaacagctctgggagataaagcatatgcctgggataccaatgaagaatacctcttcaaagcgatggtagctttctccatgagaaaagttcccaacagagaagcaacagaaatttcccatgtcctactttgcaatgtaacccagagggtatcattctggtttgtggttacagacccttcaaaaaatcacacccttcctgctgttgaggtgcaatcagccataagaatgaacaagaaccggatcaacaatgccttctttctaaatgaccaaactctggaatttttaaaaatcccttccacacttgcaccacccatggacccatctgtgcccatctggattattatatttggtgtgatattttgcatcatcatagttgcaattgcactactgattttatcagggatctggcaacgtagaagaaagaacaaagaaccatctgaagtggatgacgctgaagataagtgtgaaaacatgatcacaattgaaaatggcatcccctctgatcccctggacatgaagggagggcatattaatgatgccttcatgacagaggatgagaggctcacccctctctgaagggctgttgttctgcttcctcaagaaattaaacatttgtttctgtgtgactgctgagcatcctgaaataccaagagcagatcatatattttgtttcaccattcttcttttgtaataaattttgaatgtgcttgaaagtgaaaagcaatcaattatacccaccaacaccactgaaatcataagctattcacgactcaaaatattctaaaatatttttctgacagtatagtgtataaatgtggtcatgtggtatttgtagttattgatttaagcatttttagaaataagatcaggcatatgtatatattttcacacttcaaagacctaaggaaaaataaattttccagtggagaatacatataatatggtgtagaaatcattgaaaatggatcctttttgacgatcacttatatcactctgtatatgactaagtaaacaaaagtgagaagtaattattgtaaatggatggataaaaatggaattactcatatacagggtggaattttatcctgttatcacaccaacagttgattatatattttctgaatatcagcccctaataggacaattctatttgttgaccatttctacaatttgtaaaagtccaatctgtgctaacttaataaagtaataac

SEQ ID NO: 206 - DNA, 1427 bp, Homo sapiens
  misc_feature: Incyte ID No: 1503093.1
ctctatattggctgtggaataattacgttctctttaatctctcaacagcttttatggtagaatacttatatcaattcagcactgctccttgaaatagcaggtcctcttgtttgaactgataaataatgaggagcccccccaaaaaatgttttctatttcctgacagccatgagtcctactttaagtatgtatataaaatatatgtgtgtgtgtgtgtgtgtgtatatattcctatcagatactcatattcctaacttctaaatatctggtatagtgtttgaaatatgattaaatgtacctatgcttgggcaaaatagcttttgaaaacaggaactcatgccagaagcccctggttgtctgaaaggtatgctttactcagtctaatggtgctgttggagtctggggagaatgtcatgctaataaatagaacactataaaaatattaagagaatgtcctaatgaagtgtgcatgaaacatgttgacaattttttatgagcaacagaaataaatcattttaaaagttctcagaaaacctatttatgtcatctttgcttttgtgagtttgtgttaccgcacaactcccagacttttaactgcctgtaccttggaaatgtctgctgttcgtaacttcttcagtttgtataacagtgctgcagctgtatttggtttttacctctccctgttcccacggcacaccgtcagtgaaccttcaccaaaccccacgtgcattttatcctcagtgaattgttggtggaggtgcacctgactgctctgtgagaatccgtgccatggctcctttgggtcaaagatgccctcccctccgtcttaggttcttgtctagaaatgagtaatgtcttacaagcatgcctagttctaatcatctcatcctgtgtttgtgattgatgtttgcctgcctaaatgtacaaaccaccattgtgtccaaagcacagctattcatgacttaattttctaatctcaccacagagaaagtggctcatgccaaagaagaaaaccttagtatgcatcagatgctggatcagactttactggagttaaacaacatgtgaaaacctccttagctgcgaccacattctttcgttttgttttgttttgtttttaaacacctgcttaccccttaaatgcaatttatttacttttaccactgtcacagaaacatccacaagataccagctaggtcagggggtggggaaaacacatacaaaaaggcaagcccatgtcagggcgatcctggttcaaatgtgccatttcccgggttgatgctgccacactttgtagagagtttagcaacacagtgtgcttagtcagcgtaggaatcctcactaaagcagaagaagttccattcaaagtgccaatgatagagtcaacaggaaggttaatgttggaaacacaatcaggtgtggattgg

SEQ ID NO: 207 - DNA, 1047 bp, Homo sapiens
  misc_feature: Incyte ID No: 338662.1
cacatattcattttgtgcttattcttttgagagaaacacagataaaagcctatcctttaattcatactccccatactgtgattttcatttttactgcaacaaattttgttcagtgtgataatgaatgtcaaacacttaatgccttgctcttttcagtaacatgacatattggagaataatgactgaagcttatctacactgcctacgtctgttttcttccaccttgaaagaagttgttgaaagtaattaagaagtattatgtgtaaaactccagggatgatgtgcttcaaggaagcaacatttatgaagttgtgtgcttgactagtagtttataaagaggaaagacgaatcatttattgtcttgggattgaatcttggcaatttttaaactataaagttacaggaaatgttggctgctcttaatgggccatttgttgtgttaaaaatcagtactgagaaatatttactaggtaagtggaaagatccatctctataaattgttgtaacttaccattttacaaatcttagttactcagtttttctgcttaaaaatgaaatcatgtagcactgtataagtcattcagttttttattttggagaattactctggattgtctaggctctgtgctctccacatatatttttgaaatagtttgtgaatttctacaaaaactcctgctcagaattttcactgagagtatgcttaatctatgggttaatttgtgagaaattgatagcttaacaatagtgaatcttctgatctacaagtgtggtatttctctccatttatttaggtcttctttattttgatagcgttttgtagctttcaatgtacagatcttgcaaatatcttgttaaatatttccctaattacttgatatttatttttgatgctgttatagttatattttaaaaattttgattccaattgttgctaatacatagaaatgaaattatttattgacctcttatgcctgtgacattgataaacgcagtcatatattcgtagaatttttaggaatttttctaataatagactatcatata

SEQ ID NO: 208 - DNA, 1367 bp, Homo sapiens
  misc_feature: Incyte ID No: 324037.1
gttaaaatgcaatcatagtgacttcagaaaatttggaaaatacagaaaatatagggaagaataaaattaacccacagttctgtcacctaaaggtaactgctgccaatgttttcatgtatttcttttctgtctctccaatgcatttttttacatagttgtgagcgttagccaagttattttcatgttgttatgtaatcaatatttttcaatagaagtattagaggttttttttattgatataaaaataacaattacagatcctgatatatagaagttattcaaaattatacagttttcaaaaaatcaagacaagtaggcccaatacaaactactgaatcatcttctaatttccctctaaaatatttatagaaatatgtaagtagaaaaacattcatcctttcctcgtctaattatgatcctgccatattccaggcacaagagaaagctctggggcttgagtcttaatagggctgatagtccaaccaggggacagggtatcataaagagataattcaaaactttaagattggagggtaggtgatggtagaaaattctgcggcaaacatttgttgatgctcatcatttgttgatgtcatcaaagatcaccagggcataattataatcaaaattagttttattgatgcttgctgcagcaagagagactgcacaccactggggtctatgggtgcttctcagtgggaaggtgtaaggaggggcttgctaagaatttgagcacatgtagctaattttaaggagggctcaagtgagcaagggtttcttctggattgagtgctgtcagaaagtggattgagtgctgtcagaaagtgggagtgattttgcaactgggtatcttaatttttatgttgtgggtgggaggaaaggaaagaagcaacagtcacccatgttagccacaagaagaggttggctgtttatggtttgcacagtgactttgtttttatctgtgctcaggcatgattacagtatctcattttatccggattacagtgacctcatctgatcttagagatttgagaattgttaaatgttcagcaggagaacgccaccgcctagtgtgaatgctaggtcagaagctgctttttcacactgaaaccatttaagtatgtacaaataagttaatagtgtaaatgtaggtgtaaaatacaatgcaaaacaaaataatgaagtaagtgaattaaattattgcaccaaatatggggatatgaaatagggaaagaaaagcattaagttacttatagtccataaagggactacattattttgttactctgataatcccataaaacaaagttttaagaatgtttacagtaaccatgaatggaattagtgaaactattcatatcaatgca

SEQ ID NO: 209 - DNA, 783 bp, Homo sapiens
  misc_feature: Incyte ID No: 989010.3
gagaggaacagaaaggataaggatgctttcgaacagcaactgctttcttaattaaatggtagagatcttccagaaacatccaattctcaaactgaagctcgcactctcgcctccagcatgaaagtctctgccgcccttctgtgcctgctgctcatagcagccaccttcattccccaagggctcgctcagccagatgcaatcaatgccccagtcacctgctgttataacttcaccaataggaagatctcagtgcagaggctcgcgagctatagaagaatcaccagcagcaagtgtcccaaagaagctgtgatcttcaagaccattgtggccaaggagatctgtgctgaccccaagcagaagtgggttcaggattccatggaccacctggacaagcaaacccaaactccgaagacttgaacactcactccacaacccaagaatctgcagctaacttattttcccctagctttccccagacaccctgttttattttattataatgaattttgtttgttgatgtgaaacattatgccttaagtaatgttaattcttatttaagttattgatgttttaagtttatctttcatggtactagtgttttttagatacagagacttggggaaattgcttttcctcttgaaccacagttctacccctgggatgttttgagggtctttgcaagaatcattaatacaaagaattttttttaacattccaatgcattgctaaaatattattgtggaaatgaatattttgtaactattacaccaaataaatatattt

SEQ ID NO: 210 - DNA, 756 bp, Homo sapiens
  misc_feature: Incyte ID No: 470784cB1
cccacgcgtccggctgagactaacccagaaacatccaattctcaaactgaagctcgcactctcgcctccagcatgaaagtctctgccgcccttctgtgcctgctgctcatagcagccaccttcattccccaagggctcgctcagccagatgcaatcaatgccccagtcacctgctgttataacttcaccaataggaagatctcagtgcagaggctcgcgagctatagaagaatcaccagcagcaagtgtcccaaagaagctgtgatcttcaagaccattgtggccaaggagatctgtgctgaccccaagcagaagtgggttcaggattccatggaccacctggacaagcaaacccaaactccgaagacttgaacactcactccacaacccaagaatctgcagctaacttattttcccctagctttccccagacaccctgttttattttattataatgaattttgtttgttgatgtgaaacattatgccttaagtaatgttaattcttatttaagttattgatgttttaagtttatctttcatggtactagtgttttttagatacagagacttggggaaattgcttttcctcttgaaccacagttctacccctgggatgttttgagggtctttgcaagaatcattaatacaaagaattttttttaacattccaatgcattgctaaaatattattgtggaaatgaatattttgtaactattacaccaaataaatatatttttgtacaaaaaaaaaaaa

SEQ ID NO: 211 - DNA, 1005 bp, Homo sapiens
  misc_feature: Incyte ID No: 989010.5
gtacaaaaatatatttatttggtgtaatagttacaaaatattcatttccacaataatattttagcaatgcattggaatgttaaaaaaaattctttgtattaatgattcttgcaaagaccctcaaaacatcccaggggtagaactgtggttcaagaggaaaagcaatttccccaagtctctgtatctaaaaaacactagtaccatgaaagataaacttaaaacatcaataacttaaataagaattaacattacttaaggcataatgtttcacatcaacaaacaaaattcattataataaaataaaacaaggtgtctggggaaagctaggggaaaataagttagctgcagattcttgggttgtggagtgagtgttcaagtcttcggagtttgggtttgcttgtccaggtggtccatggaatcctgaacccacttctgcttggggtcagcacagatctccttggccacaatggtcttgaagatcacagcttctttgggacacttgctgctggtgattcttctatagctcgcgagcctctgcactgagatctgtgctgaccccaagcagaagtgggttcaggattccatggaccacctggacaagcaaacccaaactccgaagacttgaacactcactccacaacccaagaatctgcagctaacttattttcccctagctttccccagacaccctgttttattttattataatgaattttgtttgttgatgtgaaacattatgccttaagtaatgttaattcttatttaagttattgatgttttaagtttatctttcatggtactagtgttttttagatacagagacttggggaaattgcttttcctcttgaaccacagttctacccctgggatgttttgagggtctttgcaagaatcattaatacaaagaattttttttaacattccaatgcattgctaaaatattattgtggaaatgaatattttgtaactattacaccaaataaatatatttttgtacaaaacctg

SEQ ID NO: 212 - DNA, 4525 bp, Homo sapiens
  misc_feature: Incyte ID No: 473040.1
gcgcgagctggcggcagtgacaggaggcgcgaacccgcagcgcttaccgcgcggcgccgcaccatggagcccgccgtgtcgctggccgtgtgcgcgctgctcttcctgctgtgggtgcgcctgaaggggctggagttcgtgctcatccaccagcgctgggtgttcgtgtgcctcttcctcctgccgctctcgcttatcttcgatatctactactacgtgcgcgcctgggtggtgttcaagctcagcagcgctccgcgcctgcacgagcagcgcgtgcgggacatccagaagcaggtgcgggaatggaaggagcagggtagcaagaccttcatgtgcacggggcgccctggctggctcactgtctcactacgtgtcgggaagtacaagaagacacacaaaaacatcatgatcaacctgatggacattctggaagtggacaccaagaaacagattgtccgtgtgtgagcccttggtgaccatgggccaggtgactgccctgcttgacctccattggctggactctccccgtgtttgcctgagctttgattgacctcacagtggggggcttgatcatgggcacaggcatcgagtcatcatcccacaagtacggcctgttccaacacatctgcactgcttacgagctggtcctggctggctcactgtctcactacgtgtcgggaagtacaagaagacacacaaaaacatcatgatcaacctgatggacattctggaagtggacaccaagaaacagattgtccgtgtggagcccttggtgaccatgggccaggtgactgccctgctgacctccattggctggactctccccgtgttgcctgagcttgatgacctcacagtggggggcttgatcatgggcacaggcatcgagtcatcatcccacaagtacggcctgttccaacacatctgcactgcttacgagctggtcctggctgatggcagctttgtgcgatgcactccgtccgaaaactcagacctgttctatgccgtaccctggtcctgtgggacgctgggtttcctggtggccgctgagatccgcatcatccctgccaagaagtacgtcaagctgcgtttcgagccagtgcggggcctggaggctatctgtgccaagttcacccacgagtcccagcggcaggagaaccacttcgtggaagggctgctctactccctggatgaggctgtcattatgacaggggtcatgacagatgaggcagagcccagcaagctgaatagcattggcaattactacaagccgtggttctttaagcatgtggagaactatctgaagacaaaccgagagggcctggagtacattcccttgagacactactaccaccgccacacgcgcagcatcttctgggagctccaggacatcatcccctttggcaacaaccccatcttccgctacctctttggctggatggtgcctcccaagatctccctcctgaagctgacccagggtgagaccctgcgcaagctgtacgagcagcaccacgtggtgcaggacatgctggtgcccatgaagtgcctgcagcaggccctgcacaccttccaaaacgacatccacgtctaccccatctggctgtgtccgttcatcctgcccagccagccaggcctagtgcaccccaaaggaaatgaggcagagctctacatcgacattggagcatatggggagccgcgtgtgaaacactttgaagccaggtcctgcatgaggcagctggagaagtttgtccgcagcgtgcatggcttccagatgctgtatgccgactgctacatgaaccgggaggagttctgggagatgtttgatggctccttgtaccacaagctgcgagagaagctgggttgccaggacgccttccccgaggtgtacgacaagatctgcaaggccgccaggcactgagctggagcccgcctggagagacagacacgtgtgagtggtcaggcatcttcccttcactcaagcttggctgctttcctagatccacactttcaaagagaaacccctccagaactcccaccctgacagcccaacaccaccttcctcctggcttccagggggcagcccagtggaatggaaagaatgtgggatttggagtcagacaagcctgagtccagttccccgtttagaactcattagctgtgtgactctgggtgagtcccttaacccctctgagcccgggtctcttcattagttgaaagggatagtaatacctacttgcaggttgttgtcatctgagttgagcactggtcacattgaaggtgctgggtaagtggtagctcttgttgcttcccgttcagcgtcacatctgcagtggagcctgaaaaggctccacattaggtcacctgtgcacagccatggctggaatgatgaaggggatacgctggagttgccctgccatcgcctccatcagccagacgaggtcctcacaggagaaggacagctcttccccaccctgggatctcaggagggcagccacggagtggggaggccccagatgcgctgtgccaaagccaggtccgaggccaaagttctccctgccatccttggtgccgtcctgccccttcctccttcatgcctgggcctgcaggcccaccccagccaccactgagtccactcggagtgccctgtgttcctggagaaggcattccagggttgaatcttgtcccagcctcagcctgggacacctaggtggagagagtggtctccgctctgaattggatccaggggacctgggctcattcttcttggctcaccaaccctgcaggcctcatctttcccaaaacccactttgtcttggtgggagtgggtccgcgctgctctgcagcaggggctggggagtggacagcatcaggtgggaaagtggagtccaccctcatgtttctgtaggattctcaccgtggggctggaagaaaagagcatcgacttgatttctccaaccactcatccctctttttctttcttccaccactccccaccccagctgtagttaatttcagtgccttacaaatcctaagctcagagaaagttccatttccgttccagagggaagggaacctccctaggtccttccctggcttgttataacgcaaagcttggttgtttatgcaactctatcttaagaactgcccagcctcagctgaaaacccgaatctgagaaggaattgcgtcatgtaagggaagctggaattaagggagctgagccagtcatggttgtggcgtgtgagtcaggagacctaggtttcagcccctctctactgtcagcgagctgtgcaacgtgggcaagtcattgtcctctgagctgcagtttcctcatctgtcacatcgctacagacaagacctccctggaacccttctgattgtcttagacactgtggttgcaaaacccacggaaagcctcatttgtgtggaaagtcagaggaaaaatgatccagtggacacttggggattatctgtcattcaagatccttccttcaaccccaaggccagctcccatctcatttccagaaaggctcatacctggcttgcagggaagcatctgtcttgtcattccaggtgccagaatcctctcagagtcattgaagggtgttcacccatcccacccaaggcttggcacactgccagtgtcttagcagggtcttgtgagggctgggggcatccaggcactcagaaggcaaaggaaccaccctacccatttggcctctggagggggcagaagaaagaaagaaacctcatcctatattttacaaagcatgtgaattctggcattagctctcataggagacccatgtgcttccttgctcagtgcaaaactgatgattctacttgctgtagatgaatggttaacacgagctagttaaacagtgccattgttttgccagtgaagcctccaaccctaagccactgggacggtggccagagatgccagcagcctctgtcgcccttagtcatataaccaaaatccagaccttatccacaacccggggcttggaaaggaaggtattttggaatcacaccctccggttatgttgctccagtaaaatcttgcctggaaagaggcagtcttcttagcatggtgagctgagttcatggcttttttttgtagccagtcctgtccctggccatccatgtgatggttttggatggagttaaacttgatgccagtgggcagtgcatgtggaaagtatcagagtaaggctctcccctccagagccctgagtttcttggctgcatgaaggttttctttagaatcagaattgtagccagtttctttggccagaaggatgaatacttggatattactgaaagggaggggtggagatgggtgtggcagtgtatggtgtgtgatttttattttcttctttggtcatgggggccaaggagaaaggcatgaatcttccctgtcaggctcttacagccacaggcactgtgtctactgtctggaagacatgtccccgtggctgtggggccgctgcttctgtttaaataaaagtggcctggaagctggaaaaa

SEQ ID NO: 213 - DNA, 4315 bp, Homo sapiens
  misc_feature: Incyte ID No: 400203.1
tcgcgatctagcgctttcattcaaactttctccagtctcggttccggcgtcagcaaggtgtgaccaatcagagcccagagacgggaataaattatgcaaatcaccatctggcgatgggtcagatgactcccatacttttaaaaactacctctataggagcgtgacagcagcgagtccttgcctcccggcggctcaggacgagggcagatctcgttctggggcaagccgttgacactcgctccctgccaccgcccgggctccgtgccgccaagttttcattttccaccttctctgcctccagtcccccagcccctggccgagagaagggtcttaccggccgggattgctggaaacaccaagaggtggtttttgttttttaaaacttctgtttcttgggagggggtgtggcggggcaggatgagcaactccgttcctctgctctgtttctggagcctctgctattgctttgctgcggggagccccgtaccttttggtccagagggacggctggaagataagctccacaaacccaaagctacacagactgaggtcaaaccatctgtgaggtttaacctccgcacctccaaggacccagagcatgaaggatgctacctctccgtcggccacagccagcccttagaagactgcagtttcaacatgacagctaaaacctttttcatcattcacggatggacgatgagcggtatctttgaaaactggctgcacaaactcgtgtcagccctgcacacaagagagaaagacgccaatgtagttgtggttgactggctccccctggcccaccagctttacacggatgcggtcaataataccagggtggtgggacacagcattgccaggatgctcgactggctgcaggagaaggacgatttttctctcgggaatgtccacttgatcggctacagcctcggagcgcacgtggccgggtatgcaggcaacttcgtgaaaggaacggtgggccgaatcacaggtttggatcctgccgggcccatgtttgaaggggccgacatccacaagaggctctctccggacgatgcagattttgtggatgtcctccacacctacacgcgttccttcggcttgagcattggtattcagatgcctgtgggccacattgacatctaccccaatgggggtgacttccagccaggctgtggactcaacgatgtcttgggatcaattgcatatggaacaatcacagaggtggtaaaatgtgagcatgagcgagccgtccacctctttgttgactctctggtgaatcaggacaagccgagttttgccttccagtgcactgactccaatcgcttcaaaaaggggatctgtctgagctgccgcaagaaccgttgtaatagcattggctacaatgccaagaaaatgaggaacaagaggaacagcaaaatgtacctaaaaacccgggcaggcatgcctttcagagtttaccattatcagatgaaaatccatgtcttcagttacaagaacatgggagaaattgagcccaccttttacgtcaccctttatggcactaatgcagattcccagactctgccactggaaatagtggagcggatcgagcagaatgccaccaacaccttcctggtctacaccgaggaggacttgggagacctcttgaagatccagctcacctgggagggggcctctcagtcttggtacaacctgtggaaggagtttcgcagctacctgtctcaaccccgcaaccccggacgggagctgaatatcaggcgcatccgggtgaagtctggggaaacccagcggaaactgacattttgtacagaagaccctgagaacaccagcatatccccaggccgggagctctggtttcgcaagtgtcgggatggctggaggatgaaaaacgaaaccagtcccactgtggagcttccctgagggtgcccgggcaagtcttgccagcaaggcagcaagacttcctgctatccaagcccatggaggaaagttactgctgaggacccacccaatggaaggattcttctcagccttgaccctggagcactgggaacaactggtctcctgtgatggctgggactcctcgcgggaggggactgcgctgctatagctcttgctgcctctcttgaatagctctaactccaaacctctgtccacacctccagagcaccaagtccagatttgtgtgtaagcagctgggtgcctggggcctctcgtgcacactggattggtttctcagttgctgggcgagcctgtactctgcctgacgaggaacgctggctccgaagaggccctgtgtagaaggctgtcagctgctcagcctgctttgagcctcagtgagaagtccttccgacaggagctgactcatgtcaggatggcaggcctggtatcttgctcgggccctagctgttggggttctcatgggttgcactgaccatactgcttacgtcttagccattccgtcctgctccccagctcactctctgaagcacacatcattggctttcctatttttctgttcattttttaattgagcaaatgtctattgaacacttaaaattaattagaatgtggtaatggacatattactgagcctctccatttggaacccagtggagttgggatttctagaccctctttctgtttggatggtgtatgtgtatatgcatggggaaaggcacctggggcctgggggaggctatacggatataagcattagggaccctgaggctttaagtggtttctatttcttcttagttattatgtgccaccttcttagttattatgtgccacctcccctatgagtgacgtgtttgatcactagcagaatagcaagcagagtatcattcatgctggggccagaatgatggccggttgccagatataactgctttggagcaaatctcttctgtttagagagatagaagttatgacatatgtaatacacatctgtgtacacagaaaccggcacctgccagacagagctggttctaagatttaatacagtgctttttttcctctttgaaatattttactttaataccagtgccttttcttgttgaacttcttggaaaagccaccaattctagatcttgatttgaattaatacacacaatatctgagacacttacacttttcaaaagatttgtgtatgcattgcctaattagagtagggggagaagggcaactattattatccctattttacaaaactgaggcttagtgaggttcagccacatgcctagacttatatactagttagtggtgcagccagggagaggactcagatttcctggaggcaaagtctatctctgaaactccatgaagacttttgcagccagttcccaccaatatgccccagacgtgagacaaacaaggacttttttttttatatagagccatccataaaatcctaagcccttttattaatgtataaccaggagaacatctgtgccaacggttggactttttatggctgagattcgggaggaagtgtgacaccaagcaggagaggaagaatgattttctttgtacttaggttttctaaggacattgttttaatctgtatcgtgccaaagttgtatcactgttaaacttctgaagacataaccagttgagtcttatttcaagatatgttctcaagccaattgtgtgcttctcttgtttctgtgattgctttctagccaaagcgaagcttgtacaggttgagtatcccttatccaaaatgcttggaaccagaagtgtttcaaattttagattattttcagattttggaatgtttgcatatacataatgagatattttgggaataggacccgagcctaaacacaaaattcattgatgtgtcagttacaccttatccacatagcctgagggtaattttatacgatattttaaatagttgtgtacatgaagcatggtttgtggtaacttatgtgaggggttttcccattttttgtcttgttggtgctcaaaaagttttggattttggagcatttcggattttggatttttggattagggttgctcaacccatattattggctgtacatcctggtcacttctgacttctgtttttactaatggaagctttgcaaattgaattctcagtgagttgtatatttatacacctggcttgaagccttaattgtatataatgatgctttttaaaaaatgctatttggaagactatttatttctcgtgtatataatgtatataaaaaaatatggttagtgtttacctaaggttaaccacatttcaagattaaaatttttaaatagtaaaataataacaaaattataaagttctaaaaaacac

SEQ ID NO: 214 - DNA, 1451 bp, Homo sapiens
  misc_feature: Incyte ID No: 474437.17
  unsure 1407: a, t, c, g, or other
gggctcaggggtagggatcctcgggtgagagggctggctggccggggtaagttgctctggacgtgctggcggggagcagtcctggtggcgggatggcgggggcacttctgggtcccagggtgcacgggatccgggcagtgctcagggtggcaagaggcggcgtgcaggcacctggggcgccggggtctctaggcgtttcacacgcagcagcgcccccagcacgccctcagggggcagctcagagcccacatcgtggtcggcggcacggcggaggcgtcgccaggaggagcgcgcgggcacagggtgccgctgaccgaggcgtgcaaagactccagaattggaggcatgatgaagactctgctgctgtttgtggggctgctgctgacctgggagagtgggcaggtcctgggggaccagacggtctcagacaatgagctccaggaaatgtccaatcagggaagtaagtacgtcaataaggaaattcaaaatgctgtcaacggggtgaaacagataaagactctcatagaaaaaacaaacgaagagcgcaagacactgctcagcaacctagaagaagccaagaagaagaaagaggatgccctaaatgagaccagggaatcagagacaaagctgaaggagctcccaggagtgtgcaatgagaccatgatggccctctgggaagagtgtaagccctgcctgaaacagacctgcatgaagttctacgcacgcgtctgcagaagtggctcaggcctggttggccgccagcttgaggagttcctgaaccagagctcgcccttctacttctggatgaatggtgaccgcatcgactccctgctggagaacgaccggcagcagacgcacatgctggatgtcatgcaggaccacttcagccgcgcgtccagcatcatagacgagctcttccaggacaggttcttcacccgggagccccaggatacctaccactacctgcccttcagcctgccccaccggaggcctcacttcttctttcccaagtcccgcatcgtccgcagcttgatgcccttctctccgtacgagcccctgaacttccacgccatgttccagcccttccttgagatgatacacgaggctcagcaggccatggacatccacttccatagcccggccttccagcacccgccaacagaattcatacgagaaggcgacgatgaccggactgtgtgccgggagatccgccacaactccacgggctgcctgcggatgaaggaccagtgtgacaagtgccgggagatcttgtctgtggactgttccaccaacaacccctcccaggctaagctgcggcgggagctcgacgaatccctcctggtcaacctctcagcgacctggagggattcgtcgagaggttgaccaggaaatacaacgagctgctanagtcctaccagtggaagatgctcaacacctcctccttgctggag

SEQ ID NO: 215 - DNA, 2746 bp, Homo sapiens
  misc_feature: Incyte ID No: 1345561cB1
aaggcccctgtggacgaccatctgccagcttctctcgttccgtcgattgggaggagcggtggcgacctcggccttcagtgtttccgacggagtgaatggcggcggcggctgggatgctgctgctgggcttgctgcaggcgggtgggtcggtgctgggccaggcgatggagaaggtgacaggcggcaacctcttgtccatgctgctgatcgcctgcgccttcaccctcagcctggtctacctgatccgtctggccgccggccacctggtccagctgcccgcaggggtgaaaagtcctccatacattttctccccaattccattccttgggcatgccatagcatttgggaaaagtccaattgaatttctagaaaatgcatatgagaagtatggacctgtatttagttttaccatggtaggcaagacatttacttaccttctggggagtgatgctgctgcactgctttttaatagtaaaaatgaagacctgaatgcagaagatgtctacagtcgcctgacaacacctgtgtttgggaagggagttgcatacgatgtgcctaatccagttttcttggagcagaagaaaatgttaaaaagtggccttaacatagcccactttaaacagcatgtttctataattgaaaaagaaacaaaggaatactttgagagttggggagaaagtggagaaaaaaatgtgtttgaagctctttctgagctcataattttaacagctagccattgtttgcatggaaaggaaatcagaagtcaactcaatgaaaaggtagcacagctgtatgcagatttggatggaggtttcagccatgcagcctggctcttaccaggttggctgcctttgcctagtttcagacgcagggacagagctcatcgggaaatcaaggatattttctataaggcaatccagaaacgcagacagtctcaagaaaaaattgatgacattctccaaactttactagatgctacatacaaggatgggcgtcctttgactgatgatgaagtagcagggatgcttattggattactcttggcagggcagcatacatcctcaactactagtgcttggatgggcttctttttggccagagacaaaacacttcaaaaaaaatgttatttagaacagaaaacagtctgtggagagaatctgcctcctttaacttatgaccagctcaaggatctaaatttacttgatcgctgtataaaagaaacattaagacttagacctcctataatgatcatgatgagaatggccagaactcctcagactgtggcagggtataccattcctccaggacatcaggtgtgtgtttctcccactgtcaatcaaagacttaaagactcatgggtagaacgcctggactttaatcctgatcgctacttacaggataacccagcatcaggggaaaagtttgcctatgtgccatttggagctgggcgtcaccgttgtattggggaaaattttgcctatgttcaaattaagacaatttggtccactatgcttcgtttatatgaatttgatctcattgatggatactttcccactgtgaattatacaactatgattcacacccctgaaaacccagttatccgttacaaacgaagatcaaaatgaaaaaggttgcaaggaacgaatatatgtgattatcactgtaagccacaaaggcattcgaagagaatgaagtgtacaaaacaactcttgtagtttactgtttttttaagtgtgtaattctaaaagccagtttatgatttaggattttgttaactgaatggttctatcaaatataatagcatttgaaacattttctaatagttatgatacttatacatgtgctttcaggaagttccttggtgaaacaattgttgaggggggatctaggtaattggcagattctaaataatataatttccagatagtaattttaagagtactcatcgctcttgccaaataagttcagggtattcaaatcttggactagtcctgcaaggtataaagaataaaaatcccagtgagatacttggaaaccacagtttattattatttatctgggcaattattgtgtgtgtgaggatggaagggtagggaataatcgaacatctaaagccttgaataagagaatattaattgttttggtatgatgatactcagaaatggagatattataggaaaaagaaatcctttggaattttaactaaaatcactgcatatgggaaattaagagatccaggaccatatttgataagagttcctaaaaataatgtaattattaatgctaaagactgctcatgtatcttgatctaattactaaataattacatatttatttacctgataaatatgtatctagttctacaaggtcacatttatgtggaagtccaaagtcaagtccttaggggataattttgttttggctcagttgttccctgcttccttttttttttttttttttgagatggagtctcgctctgttgcccaggctggagtgcagtggtgcgatctcagctcactgcatcctctgcctcccgggttcaagcaattctctgcctcagcctcccaagtagttgggattacaggcacctgccaccatgcctggctaattttttgtatttttagtagagacgggggattcactatgttggctaagctggtcttgaactcatgacctcgtggatcacccgccttgggcctcccaaagtgctggggataacaggcattagccacggaaccttgacttt

SEQ ID NO: 216 - DNA, 2098 bp, Homo sapiens
  misc_feature: Incyte ID No: 1513913cB1
gccgcgggcgggagggcggacggaccgactgacggtagggacgggaggcgagcaagatggcgcagacgcagggcacccggaggaaagtctgttactactacgacggggatgttggaaattactattatggacaaggccacccaatgaagcctcaccgaatccgcatgactcataatttgctgctcaactatggtctctaccgaaaaatggaaatctatcgccctcacaaagccaatgctgaggagatgaccaagtaccacagcgatgactacattaaattcttgcgctccatccgtccagataacatgtcggagtacagcaagcagatgcagagattcaacgttggtgaggactgtccagtattcgatggcctgtttgagttctgtcagttgtctactggtggttctgtggcaagtgctgtgaaacttaataagcagcagacggacatcgctgtgaattgggctgggggcctgcaccatgcaaagaagtccgaggcatctggcttctgttacgtcaatgatatcgtcttggccatcctggaactgctaaagtatcaccagagggtgctgtacattgacattgatattcaccatggtgacggcgtggaagaggccttctacaccacggaccgggtcatgactgtgtcctttcataagtatggagagtacttcccaggaactggggacctacgggatatcggggctggcaaaggcaagtattatgctgttaactacccgctccgagacgggattgatgacgagtcctatgaggccattttcaagccggtcatgtccaaagtaatggagatgttccagcctagtgcggtggtcttacagtgtggctcagactccctatctggggatcggttaggttgcttcaatctaactatcaaaggacacgccaagtgtgtggaatttgtcaagagctttaacctgcctatgctgatgctgggaggcggtggttacaccattcgtaacgttgcccggtgctggacatatgagacagctgtggccctggatacggagatccctaatgagcttccatacaatgactactttgaatactttggaccagatttcaagctccacatcagtccttccaatatgactaaccagaacacgaatgagtacctggagaagatcaaacagcgactgtttgagaaccttagaatgctgccgcacgcacctggggtccaaatgcaggcgattcctgaggacgccatccctgaggagagtggcgatgaggacgaagacgaccctgacaagcgcatctcgatctgctcctctgacaaacgaattgcctgtgaggaagagttctccgattctgaagaggagggagaggggggccgcaagaactcttccaacttcaaaaaagccaagagagtcaaaacagaggatgaaaaagagaaagacccagaggagaagaaagaagtcaccgaagaggagaaaaccaaggaggagaagccagaagccaaaggggtcaaggaggaggtcaagttggcctgaatggacctctccagctctggcttcctgctgagtccctcacgtttcttccccaacccctcagattttatattttctatttctctgtgtatttatataaaaatttattaaatataaatatccccagggacagaaaccaaggccccgagctcagggcagctgtgctgggtgagctcttccaggagccaccttgccacccattcttcccgttcttaactttgaaccataaagggtgccaggtctgggtgaaagggatacttttatgcaaccataagacaaactcctgaaatgccaagtgcctgcttagtagctttggaaaggtgcccttattgaacattctagaaggggtggctgggtcttcaaggatctcctgtttttttcaggctcctaaagtaacatcagccatttttagattggttctgttttcgtaccttcccactggcctcaagtgagccaagaaacactgcctgccctctgtctgtcttctcctaattctgcaggtggaggttgctagtctagtttcctttttgagatactattttcatttttgtgagcctctttgtaataaaatggtacatttctataaaaaaaaaaaa

SEQ ID NO: 217 - DNA, 1567 bp, Homo sapiens
  misc_feature: Incyte ID No: 1453827.5
gcggccgcagcgggccgggccggtccggcgggccgggggatggcgctgctggacctggccttggagggaatggccgtcttcgggttcgtcctcttcttggtgctgtggctgatgcatttcatggctatcatctacacccgattacacctcaacaagaaggcaactgacaaacagccttatagcaagctcccaggtgtctctcttctgaaaccactgaaaggggtagatcctaacttaatcaacaacctggaaacattctttgaattggattatcccaaacctttatttttctcggtagcaccaatgaaaagaatagagaagacacagatgtgatagccttaatgcagcacttattaatatgaagtgctcctttgtgtacaagatcatgatgatccagccattgatgtatgtaagaagcttcttggaaaatatccaaatgttgatgctagattgtttataggtggcaaaaaagttggcattaatcctaaaattaataatttaatgccaggatatgaagttgcaaagtatgatcttatatggatttgtgatagtggaataagagtaattccagatacacttactgacatggtgaatcaaatgacagaaaaagtaggcttggttcacgggctgccttacgtagcagacagacagggctttgctgccaccttagagcaggtatattttggaacttcacatccaagatactatatctctgccaatgtaactggtttcaaatgtgtgacaggaatgtcttgtttaatgagaaaagatgtgttggatcaagcaggaggacttatagcttttgctcagtacattgccgaagattactttatggccaaagcgatagctgaccgaggttggaggtttgcaatgtccactcaagttgcaatgcaaaactctggctcatattcaatttctcagtttcaatccagaatgatcaggtggaccaaactacgaattaacatgcttcctgctacgataatttgtgagccaatttcagaatgctttgttgccagtttaattattggatgggcagcccaccatgtgttcagatgggatattatggtatttttcatgtgtcattgcctggcatggtttatatttgactacattcaactcaggggtgtccagggtggcacactgtgtttttcaaaacttgattatgcagtcgcctggttcatccgcgaatccatgacaatatacatttttttgtctgcattatgggacccaactataagctggagaactggtcgctacagattacgctgtgggggtacagcagaggaaatcctagatgtataactacagctttgtgactgtatataaaggaaaaaagagaagtattataaattatgtttatataaatgcttttaaaaatctaccttctgtagttttatcacatgtatgttttggtatctgttctttaatttatttttgcatggcacttgcatctgtgaaaaaaaaaaaaaacacatctgtagtcttggccaaatgatacactttattttgtggaagtagagaatcaagagaattggttctaggaacctgggttcgttcatcattgttg

SEQ ID NO: 218 - DNA, 1511 bp, Homo sapiens
  misc_feature: Incyte ID No: 199471.2
caggaaggctgagagaaagggcaggtccccgctgcgtggggctgggcttaaaggctcgtcgcgcctgcgcaaaggacctgacgacgtgctgcgtcgttacttttgaaacgcttggcggggaagtgctgttggagccgctgtggttgctgtccgcggagtggaagcgcgtgcttttgtttgtgtccctggccatggcgctgcagctctcccgggagcagggaatcaccctgcgcgggagcgccgaaatcgtggccgagttcttctcattcggcatcaacagcattttatatcagcgtggcatatatccatctgaaacctttactcgagtgcagaaatacggactcaccttgcttgtaactactgatcttgagctcataaaatacctaaataatgtggtggaacaactgaaagattggttatacaagtgttcagttcagaaactggttgtagttatctcaaatattgaaagtggtgaggtcctggaaagatggcagtttgatattgagtgtgacaagactgcaaaagatgacagtgcacccagagaaaagtctcagaaagctatccaggatgaaatccgttcagtgatcagacagatcacagctacggtgacatttctgccactgttggaagtttcttgttcatttgatctgctgatttatacagacaaagatttggttgtacctgaaaaatgggaagagtcgggaccacagtttattaccaattctgaggaagtccgccttcgttcatttactactacaatccacaaagtaaatagcatggtggcctacaaaattcctgtcaatgactgaggatgacatgaggaaaataatgtaattgtaattttgaaatgtggttttcctgaaatcaggtcatctatagttgatatgttttatttcattggttaatttttacatggagaaaaccaaaatgatacttactgaactgtgtgtaattgttccttttatttttttggtacctatttgacttaccatggagttaacatcatgaatttattgcacattgttcaaaaggaaccaggaggtttttttgtcaacattgtgatgtatattcctttgaagatagtaactgtagatggaaaaacttgtgctataaagctagatgctttcctaaatcagatgttttggtcaagtagtttgactcagtataggtagggagatatttaagtataaaatacaacaaaggaagtctaaatattcagaatctttgttaaggtcctgaaagtaactcataatctataaacaatgaaatattgctgtatagctccttttgaccttcatttcatgtatagttttccctattgaatcagtttccaattatttgactttaatttatgtaacttgaacctatgaagcaatggatatttgtactgtttaatgttctgtgatacagaactcttaaaaatgttttttcatgtgttttataaaatcaagttttaagtgaaagtgaggaaataaagttaagtttgttttaaatttgtcttaagaaaaaag

SEQ ID NO: 219 - DNA, 1743 bp, Homo sapiens
  misc_feature: Incyte ID No: 000278cB1
ggcctgccccctgtccggccagcccctcgaagcacctactccacaggtccagccggccggtgagcgcctggggaccgcagaggtgagagtcgcgcccgggagtccgccgcctgcgccaggatggagttcgtgaaatgccttggccaccccgaagagttctacaacctggtgcgcttccggatcgggggcaagcggaaggtgatgcccaagatggaccaggactcgctcagcagcagcctgaaaacttgctacaagtatctcaatcagaccagtcgcagtttcgcagctgttatccaggcgctggatggggaaatgcgcaacgcagtgtgcatattttatctggttctccgagctctggacacactggaagatgacatgaccatcagtgtggaaaagaaggtcccgctgttacacaactttcactctttcctttaccaaccagactggcggttcatggagagcaaggagaaggatcgccaggtgctggaggacttcccaacgatctcccttgagtttagaaatctggctgagaaataccaaacagtgattgccgacatttgccggagaatgggcattgggatggcagagtttttggataagcatgtgacctctgaacaggagtgggacaagtactgccactatgttgctgggctggtcggaattggcctttcccgtcttttctcagcctcagagtttgaagaccccttagttggtgaagatacagaacgtgccaactctatgggcctgtttctgcagaaaacaaacatcatccgtgactatctggaagaccagcaaggaggaagagagttctggcctcaagaggtttggagcaggtatgttaagaagttaggggattttgctaagccggagaatattgacttggccgtgcagtgcctgaatgaacttataaccaatgcactgcaccacatcccagatgtcatcacctacctttcgagactcagaaaccagagtgtgtttaacttctgtgctattccacaggtgatggccattgccactttggctgcctgttataataaccagcaggtgttcaaaggggcagtgaagattcggaaagggcaagcagtgaccctgatgatggatgccaccaatatgccagctgtcaaagccatcatatatcagtatatggaagagatttatcatagaatccccgactcagacccatcttctagcaaaacaaggcagatcatctccaccatccggacgcagaatcttcccaactgtcagctgatttcccgaagccactactcccccatctacctgtcgtttgtcatgcttttggctgccctgagctggcagtacctgaccactctctcccaggtaacagaagactatgttcagactggagaacactgatcccaaatttgtccatagctgaagtccaccataaagtggatttactttttttctttaaggatggatgttgtgttctctttatttttttcctactactttaatccctaaaagaacgctgtgtggctgggacctttaggaaagtgaaatgcaggtgagaagaacctaaacatgaaaggaaagggtgcctcatcccagcaacctgtccttgtgggtgatgatcactgtgctgcttgtggctcatggcagagcattcagtgccacggtttaggtgaagtcgctgcatatgtgactgtcatgagatcctacttagtatgatcctggctagaatgataattaaaagtatttaatttgaagcaccaaaaaaaaaaa

SEQ ID NO: 220 - DNA, 2756 bp, Homo sapiens
  misc_feature: Incyte ID No: 233942.1
tgtgtgaatagctctctgtgtgtgggtgtgtgagagagcggctggttcattgtgtgtgtgtttgggcgaggggtgagtgttcagagagggcccctttaactcttatgttacttctcctggggtacattttacaagaaaataatatactgtacaagttttgtttacttggagaagagattgaagctttttgttgccttatctagctctggctgggtttctgttggctgtcattgtcatctccaggtacctaaagaaatagaggccacatgggatgcagtgtggcttctcccatccctatccccaactcacctgacccaagagaaggttcccctagcacactcaaacaagacccccttgtcttctggtgtctttgaaatgtcaagataacagccactgggtgtctgcggaaccacctctccagccctaaagcaaatctgtctcatgttgccttataaaagagaagctcataatgaatgtttagcctttatcagttacatccaatcttggaataagtcatagagaataacaagtctgggactgacgtaggaaaaacagtagtctgtttaagttgagaggaggaggatgtggacgagagaagggaggagagggaagaactgaaatgtctcctcacccagggtggttattgggcccaacttggaatggggttgagtacgaaggttaaaaaacatatactttggtattatattggtcattgtaatagcagttgtaaaatatggggggaaaagggatcatttgctttcctttcatggtgttaatgtgtgcctgaatctatagccgctaaaatgtaaggctgtccacctgacttatttaaatattatcagagaatagaaagtaatcactttttaagtgtacctatgtgctgccccttaaaacattcatggcatctggcaaatagacccttgtaggctggcctggcatattcagatgttgccgcatcatcacagagaaggtcaaatgaagatgtaaccattgctgctcatgtgtcttctctaagcaacaaggggagcgggatgtaagagagaagttgctaatgatactgtacaaaggatggattaaataatgaagtcaatttcattgatagaaaatgcaaattttaagattctcagtgtatgaggtctcagcctcgggagcatttattttttactttcctgctaaaaatccactggggaggtataaaattcactccaaagaagtttgcctgggccaaaagcctccaggttccttctgagaacaaaatactaatgatttttttttttttttggctgcttgggagagactttcagcattctttcacgatatccagatatgtcccttcagcacacacactcaactttctcatctggttcgtttcatcctcccgaaagaacggtgctctcccactcttactctatttcaaagagctactctgtctcaaccacagcagccctgccaagaaaaggcaagatgaaaggctagagcatgtgctaccttgagatttcaagaagtgtcctacctcagctgaagatggagaaacggggagtggagaggggatcagcccagggtaccatgtgatgactaatatgccactcattaagggcttttacctcggctgtccacatccagtcatgcatttggggccaggcatgcctgcgaaatgattgacattcctgtaggtgccccatagaggtgtggcattgagaaattatgtctggaaaatacagccagtgtagtgaccagctgagttaccatataccctgatgattccccttctgtaacagaaggtgacaacaactttgtgaactttctatatctttatctgatgccccaagtggcatcttctttatgtacatgccttagttgagaatatgagactgctctaatctttgtgaatgccttcacacttcagctgaggatgtcaccttctctgtcactccccatcctgcaacctctgcctttgctctgtctaccccagcaattttcatagtgttatccaggtactgtgctaaaaggtcagctcttctgtaaaatgccatgcttcgcagcttcaaaaagcaaaattctgtatttcatggagggagggaagggtcattctcttctaagaaaaatagactggacaggcgaatgcatgcatgcatgtgtttagagttgcttctcagaagacaaagagatgatagcaactattagaatatgactgaatgactgagtgaatgagttgaaggcctagctcgggctgataaagcttttgccttagtagaggttttatgtcaacaccttcaggagggaagcccttatttctgggttgaactccccttccatgatattatgctagcaattgccatcacttagttcctggcgaaggcagaaaaagaaaacaaaaaatcagcattgtcattgacaaaactggatgctgaagataaagtaaaattgtcttttcccttgtcccacatttttgggattaaagccagaattgaataggaaatacagtactatttctgaagttgatagccgatctttaagaagaccctgtctttaaaatgaaactagcaggcaaacacctaaataatcgaaaattaccaaagaacaacaacgaaacaagaaaacctaaagatttttacttcctattcttattcctttccttattactgtgacaccccttgcattgctcagttgcctgtgtgtcaaaataacttgtggacgttggaaattatttgaaaatgtattgtgtggaatgtaataaaatgatgatatttttatac

SEQ ID NO: 221 - DNA, 3681 bp, Homo sapiens
  misc_feature: Incyte ID No: 1136923.19
gaggagtccagtgctggaggggcagggacggcggcggcgcaggtcggaacccgccaggtccagggtccaggttccagcgcccggcggcccagcaggcaccccccgagcccagctccacacaccgttcctggatctcctctccccaggcggagcgtgcccctgcccagtccagtgaccttcgcctgttggagccctggttaatttttgcccagtctgcctgttgtggggctcctcccctttggggatataagcccggcctggggctgctccgttctctgcctggcctgaggctccctgagccgcctccccaccatcaccatggccaagggcttctatatttccaagtccctgggcatcctggggatcctcctgggcgtggcagccgtgtgcacaatcatcgcactgtcagtggtgtactcccaggagaagaacaagaacgccaacagctcccccgtggcctccaccaccccgtccgcctcagccaccaccaaccccgcctcggccaccaccttggaccaaagtaaagcgtggaatcgttaccgcctccccaacacgctgaaacccgattcctaccaggtgacgctgagaccgtacctcacccccaatgacaggggcctgtacgtttttaagggctccagcaccgtccgtttcacctgcaaggaggccactgacgtcatcatcatccacagcaagaagctcaactacaccctcagccaggggcacagggtggtcctgcgtggtgtgggaggctcccagccccccgacattgacaagactgagctggtggagcccaccgagtacctggtggtgcacctcaagggctccctggtgaaggacagccagtatgagatggacagcgagttcgagggggagttggcagatgacctggcgggcttctaccgcagcgagtacatggagggcaatgtcagaaaggtggtggccactacacagatgcaggctgcagatgcccggaagtccttcccatgcttcgatgagccggccatgaaggccgagttcaacatcacgcttatccaccccaaggacctgacagccctgtccaacatgcttcccaaaggtcccagcaccccacttccagaagaccccaactggaatgtcactgagttccacaccacgcccaagatgtccacgtacttgctggccttcattgtcagtgagttcgactacgtggagaagcaggcatccaatggtgtcttgatccggatctgggcccggcccagtgccattgcggcgggccacggcgattatgccctgaacgtgacgggccccatccttaacttctttgctggtcattatgacacaccctacccactcccaaaatcagaccagattggcctgccagacttcaacgccggcgccatggagaactggggactggtgacctaccgggagaactccctgctgttcgaccccctgtcctcctccagcagcaacaaggagcgggtggtcactgtgattgctcatgagctggcccaccagtggttcgggaacctggtgaccatagagtggtggaatgacctgtggctgaacgagggcttcgcctcctacgtggagtacctgggtgctgactatgcggagcccacctggaacttgaaagacctcatggtgctgaatgatgtgtaccgcgtgatggcagtggatgcactggcctcctcccacccgctgtccacacccgcctcggagatcaacacgccggcccagatcagtgagctgtttgacgccatctcctacagcaagggcgcctcagtcctcaggatgctctccagcttcctgtccgaggacgtattcaagcagggcctggcgtcctacctccacacctttgcctaccagaacaccatctacctgaacctgtgggaccacctgcaggaggctgtgaacaaccggtccatccaactccccaccaccgtgcgggacatcatgaaccgctggaccctgcagatgggcttcccggtcatcacggtggataccagcacggggaccctttcccaggagcacttcctccttgaccccgattccaatgttacccgcccctcagaattcaactacgtgtggattgtgcccatcacatccatcagagatggcagacagcagcaggactactggctgatagatgtaagagcccagaacgatctcttcagcacatcaggcaatgagtgggtcctgctgaacctcaatgtgacgggctattaccgggtgaactacgacgaagagaactggaggaagattcagactcagctgcagagagaccactcggccatccctgtcatcaatcgggcacagatcattaatgacgccttcaacctggccagtgcccataaggtccctgtcactctggcgctgaacaacaccctcttcctgattgaagagagacagtacatgccctgggaggccgccctgagcagcctgagctacttcaagctcatgtttgaccgctccgaggtctatggccccatgaagaactacctgaagaagcaggtcacacccctcttcattcacttcagaaataataccaacaactggagggagatcccagaaaacctgatggaccagtacagcgaggttaatgccatcagcaccgcctgctccaacggagttccagagtgtgaggagatggtctctggccttttcaagcagtggatggagaaccccaataataacccgatccaccccaacctgcggtccaccgtctactgcaacgctatcgcccagggcggggaggaggagtgggacttcgcctgggagcagttccgaaatgccacactggtcaatgaggctgacaagctccgggcagccctggcctgcagcaaagagttgtggatcctgaacaggtacctgagctacaccctgaacccggacttaatccggaagcaggacgccacctctaccatcatcagcattaccaacaacgtcattgggcaaggtctggtctgggactttgtccagagcaactggaagaagctttttaacgattatggtggtggctcgttctccttctccaacctcatccaggcagtgacacgacgattctccaccgagtatgagctgcagcagctggagcagttcaagaaggacaacgaggaaacaggcttcggctcaggcacccgggccctggagcaagccctggagaagacgaaagccaacatcaagtgggtgaaggagaacaaggaggtggtgctccagtggttcacagaaaacagcaaatagtccccagcccttgaagtcacccggccccgatgcaaggtgcccacatgtgtccatcccagcggctggtgcagggcctccattcctggagcccgaggcaccagtgtcctcccctcaaggacaaagtctccagcccacgttctctctgcctgtgagccagtctagttcctgatgacccaggctgcctgagcacctcccagcccctgcccctcatgccaaccccgccctaggcctggcatggcacctgtcgcccagtgccctggggctgatctcagggaagcccagctccagggccagatgagcagaagctctcgatggacaatgaacggccttgctgggggccgccctgtaccctctttcacctttccctaaagaccctaaatctgaggaatcaacagggcagcagatctgtatatttttttctaagagaaaatgtaaataaaggatttctagatgaaaaaa

SEQ ID NO: 222 - DNA, 3815 bp, Homo sapiens
  misc_feature: Incyte ID No: 1136923.18
gaaaggaggagtccagtgctggaggggcagggacggcggcggcgcactcggaacccgccaggtccagggtccaggttccagcgcccggcggcccaggcaccccccgagcccagctccacacaccgttcctggatctcctctccccaggcggagcgtgcccctgcccagtccagtgaccttcgcctgttggagccctggttaatttttgcccagtctgcctgttgtggggctcctcccctttggggatataagcccggcctggggctgctccgttctctgcctggcctgaggctccctgagccgcctccccaccatcaccatggccaagggcttctatatttccaagtccctgggcatcctggggatcctcctgggcgtggcagccgtgtgcacaatcatcgcactgtcagtggtgtactcccaggagaagaacaagaacgccaacagctcccccgtggcctccaccaccccgtccgcctcagccaccaccaaccccgcctcggccaccaccttggaccaaagtaaagcgtggaatcgttaccgcctccccaacacgctgaaacccgattcctaccgggtgacgctgagaccgtacctcacccccaatgacaggggcctgtacgtttttaagggctccagcaccgtccgtttcacctgcaaggaggccactgacgtcatcatcatccacagcaagaagctcaactacaccctcagccaggggcacagggtggtcctgcgtggtgtgggaggctcccagccccccgacattgacaagactgagctggtggagcccaccgagtacctggtggtgcacctcaagggctccctggtgaaggacagccagtatgagatggacagcgagttcgagggggagttggcagatgacctggcgggcttctaccgcagcgagtacatggagggcaatgtcagaaaggtggtggccactacacagatgcaggctgcagatgcccggaagtccttcccatgcttcgatgagccggccatgaaggccgagttcaacatcacgcttatccaccccaaggacctgacagccctgtccaacatgcttcccaaaggtcccagcaccccacttccagaagaccccaactggaatgtcactgagttccacaccacgcccaagatgtccacgtacttgctggccttcattgtcagtgagttcgactacgtggagaagcaggcatccaatggtgtcttgatccggatctgggcccggcccagtgccattgcggcgggccacggcgattatgccctgaacgtgacaggccccatccttaacttctttgctggtcattatgacacaccctacccactcccaaaatcagaccagattggcctgccagacttcaacgccggcgccatggagaactggggactggtgacctaccgggagaactccctgctgttcgaccccctgtcctcctccagcagcaacaaggagcgggtggtcactgtgattgctcatgagctggcccaccagtggttcgggaacctggtgaccatagagtggtggaatgacctgtggctgaacgagggcttcgcctcctacgtggagtacctgggtgctgactatgcggagcccacctggaacttgaaagacctcatggtgctgaatgatgtgtaccgcgtgatggcagtggatgcactggcctcctcccacccgctgtccacacccgcctcggagatcaacacgccggcccagatcagtgagctgtttgacgccatctcctacagcaagggcgcctcagtcctcaggatgctctccagcttcctgtccgaggacgtattcaagcagggcctggcgtcctacctccacacctttgcctaccagaacaccatctacctgaacctgtgggaccacctgcaggaggctgtgaacaaccggtccatccaactccccaccaccgtgcgggacatcatgaaccgctggaccctgcagatgggcttcccggtcatcacggtggataccagcacggggaccctttcccaggagcacttcctccttgaccccgattccaatgttacccgcccctcagaattcaactacgtgtggattgtgcccatcacatccatcagagatggcagacagcagcaggactactggctgatagatgtaagagcccagaacgatctcttcagcacatcaggcaatgagtgggtcctgctgaacctcaatgtgacgggctattaccgggtgaactacgacgaagagaactggaggaagattcagactcagctgcagagagaccactcggccatccctgtcatcaatcgggcacagatcattaatgacgccttcaacctggccagtgcccataaggtccctgtcactctggcgctgaacaacaccctcttcctgattgaagagagacagtacatgccctgggaggccgccctgagcagcctgagctacttcaagctcaagctcatgtttgaccgctccgaggtctatggccccatgaagaactacctgaagaagcaggtcacacccctcttcattcacttcagaaataataccaacaactggagggagatcccagaaaacctgatggaccagtacagcgaggttaatgccatcagcaccgcctgctccaacggagttccagagtgtgaggagatggtctctggccttttcaagcagtggatggagaaccccaataataacccgatccaccccaacctgcggtccactgtctactgcaacgctatcgcccagggcggggaggaggagtgggacttcgcctgggagcagttccgaaatgccacactggtcaatgaggctgacaagctccgggcagccctggcctgcagcaaagagttgtggatcctgaacaggtacctgagctacaccctgaacccggacttaatccggaagcaggacgccacctctaccatcatcagcattaccaacaacgtcattgggcaaggtctggtctgggactttgtccagagcaactggaagaagctttttaacgattatggtggtggctcgttctccttctccaacctcatccaggcagtgacacgacgattctccaccgagtatgagctgcagcagctggagcagttcaagaaggacaacgaggaaacaggcttcggctcaggcacccgggccctggagcaagccctggagaagacgaaagccaacatcaagtgggtgaaggagaacaaggaggtggtgctccagtggttcacagaaaacagcaaatagtccccagcccttgaagtcacccggcccccatgcaaggtgcccacatgtgtccatcccagcggctggtgcagggcctccattcctggagcccgaggcaccagtgtcctcccctcaaggacaaagtctccagcccacgttctctctgcctgtgagccagtctagttcctgatgacccaggctgcctgagcacctcccagcccctgcccctcatgccaaccccgccctaggcctggcatggcacctgtcgcccagtgccctggggctgatctcagggaagcccagctccagggccagatgagcagaagctctcgatggacaatgaacggccttgctgggggccgccctgtaccctctttcacctttccctaaagaccctaaatctgaggaatcaacagggcagcagatctgtatatttttttctaagagaaaatgtaaataaaggatttcatctgcaagcccacgccaccagcaggcgccgttctcctcgcatttctcaggcgaggaacctgagacaatgaggttaaggaagttgttcattacaagtggaagaaccctgacttacttgaattcaactttgaagcccaaa

SEQ ID NO: 223 - DNA, 1300 bp, Homo sapiens
  misc_feature: Incyte ID No: 3658034cB1
agggaatcccaattatgaggcggctaagcaggcaaagaaatagcttgggtggttttgcatctactcaggataccactgtggctttaaaggctgtctgaatttgcagccctaatgaatacagaaaggacaaatatccaagtgaccgtgacggggcctagctcaccaagtcctgtaaagtttctgattgacacacacaaccgcttactccttcagacagcagagcttgctgtggtacagccaacggcagttaatatttccgcaaatggttttggatttgctatttgtcagctcaatgttgtatataatgtgaaggcttctgggtcttctagaagacgaagatctatccaaaatcaagaagcctttgatttagatgttgctgtaaaagaaaataaagatgatctcaatcatgtggatttgaatgtgtgtacaagcttttcgggcccgggtaggagtggcatggctcttatggaagttaacctattaagtggctttatggtgccttcagaagcaatttctctgagcgagacagtgaagaaagtggaatatgatcatggaaaactcaacctctatttagattctgtaaatgaaacccagttttgtgttaatattcctgctgtgagaaactttaaagtttcaaatacccaagatgcttcagtgtccatagtggattactatgagccaaggagacaggcggtgagaagttacaactctgaagtgaagctgtcctcctgtgacctttgcagtgatgtccagggctgccgtccttgtgaggatggagcttcaggctcccatcatcactcttcagtcatttttattttctgtttcaagcttctgtactttatggaactttggctgtgatttatttttaaaggactctgtgtaacactaacatttccagtagtcacatgtgattgttttgttttcgtagaagaatactgcttctattttgaaaaaagagttttttttctttctatggggttgcagggatggtgtacaacaggtcctagcatgtatagctgcatagatttcttcacctgatctttgtgtggaagatcagaatgaatgcagttgtgtgtctatattttcccctctcaaaatcttttagaatttttttggaggtgtttgttttctccagaataaaggtattactttagaataggtattctcctcattttgtgaaagaaatgaacctagattcttaagcattattacacatccatgtttgcttaaagatggatttccctgggaatgggagaaaacagccagcaggaggagcttcatctgttcccttcccacctcc

SEQ ID NO: 224 - DNA, 1820 bp, Homo sapiens
  misc_feature: Incyte ID No: 1450005.5
aaattttcaagagaggtcctgaatgttcccagaactacacaacacctagtggagtgataaagtcccccggattccctgaaaaatatcccaacagccttgaatgcacttatattgtctttgcgccaaagatgtcagagattatcctggaatttgaaagctttgacctggagcctgactcaaatcctccaggggggatgttctgtcgctacgaccggctagaaatctgggatggattccctgatgttggccctcacattgggcgttactgtggacagaaaacaccaggtcgaatccgatcctcatcgggcattctctccatggttttttacaccgacagcgcgatagcaaaagaaggtttctcagcaaactacagtgtcttgcagagcagtgtctcagaagatttcaaatgtatggaagctctgggcatggaatcaggagaaattcattctgaccagatcacagcttcttcccagtatagcaccaactggtctgcagagcgctcccgcctgaactaccctgagaatgggtggactcccggagaggattcctaccgagagtggatacaggtagacttgggccttctgcgctttgtcacggctgtcgggacacagggcgccatttcaaaagaaaccaagaagaaatattatgtcaagacttacaagatcgacgttagctccaacggggaagactggatcaccataaaagaaggaaacaaacctgttctctttcagggaaacaccaaccctacagatgttgtggttgcagtattccccaaaccactgataactcgatttgtccgaatcaagcctgcaacttgggaaactggcatatctatgagatttgaagtatatggttgcaagataacagattatccttgctctggaatgttgggtatggtgtctggacttatttctgactcccagatcacatcatccaaccaaggggacagaaactggatgcctgaaaacatccgcctggtaaccagtcgctctggctgggcacttccacccgcacctcattcctacatcaatgagtggctccaaatagacctgggggaggagaagatcgtgaggggcatcatcattcagggtgggaagcaccgagagaacaaggtgttcatgaggaagttcaagatcgggtacagcaacaacggctcggactggaagatgatcatggatgacagcaaacgcaaggcgaagtcttttgagggcaacaacaactatgatacacctgagctgcggacttttccagctctctccacgcgattcatcaggatctaccccgagagagccactcatggcggactggggctcagaatggagctgctgggctgtgaagtggaagcccctacagctggaccgaccactcccaacgggaacttggtggatgaatgtgatgacgaccaggccaactgccacagtggaacaggtgatgacttccagctcacaggtggcaccactgtgctggccacagaaaagcccacggtcatagacagcaccatacaatcagccaggctggaagtttccacattgaacctctcactccataaccctccccaacaaaaggaccctggttaaatgtacaggatggggaaggacattggaaggtaaaggcagactgtcattctctgaagcgagaagtgcctgaaacattttttcaggcaaagcggttccatgtcctggtcatttcaaaaatatccaagttcctacattttatggtatcatcagaatatgaagagccaaaagaatggatgatgtcattttctgttctataaacaataaatgtaatgtattaacaaagtaaatataggcagaactgtg

SEQ ID NO: 225 - DNA, 5708 bp, Homo sapiens
  misc_feature: Incyte ID No: 1450005.6
aacacttactaaatggaataagtttgcaccggttaattaaatatcttttttgtaagtattcacagttcatggcccgggcagtggctcctggaagaggaacaagtgtgggaaaagggagaggaagccggagctaaatgacaggatgcaggcgacttgagacacaaaaagagaagcgttcctctcggatccaggcattgcctcgctgctttcttttctccaagacgggctgaggattgtacagctctaggcggagttggggctcttcggatcgcttagattctcctctttgctgcatttccccccacgtcctcgttctcccgcgtctgcctgcggacccggagaagggagaatggagagggggctgccgctcctctgcgccgtgctcgccctcgtcctcgccccggccggcgcttttcgcaacgataaatgtggcgatactataaaaattgaaagccccgggtaccttacatctcctggttatcctcattcttatcacccaagtgaaaaatgcgaatggctgattcaggctccggacccataccagagaattatgatcaacttcaaccctcacttcgatttggaggacagagactgcaagtatgactacgtggaagtcttcgatggagaaaatgaaaatggacattttaggggaaagttctgtggaaagatagcccctcctcctgttgtgtcttcagggccatttctttttatcaaatttgtctctgactacgaaacacatggtgcaggattttccatacgttatgaaattttcaagagaggtcctgaatgttcccagaactacacaacacctagtggagtgataaagtcccccggattccctgaaaaatatcccaacagccttgaatgcacttatattgtctttgcgccaaagatgtcagagattatcctggaatttgaaagctttgacctggagcctgactcaaatcctccaggggggatgttctgtcgctacgaccggctagaaatctgggatggattccctgatgttggccctcacattgggcgttactgtggacagaaaacaccaggtcgaatccgatcctcatcgggcattctctccatggttttttacaccgacagcgcgatagcaaaagaaggtttctcagcaaactacagtgtcttgcagagcagtgtctcagaagatttcaaatgtatggaagctctgggcatggaatcaggagaaattcattctgaccagatcacagcttcttcccagtatagcaccaactggtctgcagagcgctcccgcctgaactaccctgagaatgggtggactcccggagaggattcctaccgagagtggatacaggtagacttgggccttctgcgctttgtcacggctgtcgggacacagggcgccatttcaaaagaaaccaagaagaaatattatgtcaagacttacaagatcgacgttagctccaacggggaagactggatcaccataaaagaaggaaacaaacctgttctctttcagggaaacaccaaccccacagatgttgtggttgcagtattccccaaaccactgataactcgatttgtccgaatcaagcctgcaacttgggaaactggcatatctatgagatttgaagtatacggttgcaagataacagattatccttgctctggaatgttgggtatggtgtctggacttatttctgactcccagatcacatcatccaaccaaggggacagaaactggatgcctgaaaacatccgcctggtaaccagtcgctctggctgggcacttccacccgcacctcattcctacatcaatgagtggctccaaatagacctgggggaggagaagatcgtgaggggcatcatcattcagggtgggaagcaccgagagaacaaggtgttcatgaggaagttcaagatcgggtacagcaacaacggctcggactggaagatgatcatggatgacagcaaacgcaaggcgaagtcttttgagggcaacaacaactatgatacacctgagctgcggacttttccagctctctccacgcgattcatcaggatctaccccgagagagccactcatggcggactggggctcagaatggagctgctgggctgtgaagtggaagcccctacagctggaccgaccactcccaacgggaacttggtggatgaatgtgatgacgaccaggccaactgccacagtggaacaggtgatgacttccagctcacaggtggcaccactgtgctggccacagaaaagcccacggtcatagacagcaccatacaatcagagtttccaacatatggttttaactgtgaatttggctggggctctcacaagaccttctgccactgggaacatgacaatcacgtgcagctcaagtggagtgtgttgaccagcaagacgggacccattcaggatcacacaggagatggcaacttcatctattcccaagctgacgaaaatcagaagggcaaagtggctcgcctggtgagccctgtggtttattcccagaactctgcccactgcatgaccttctggtatcacatgtctgggtcccacgtcggcacactcagggtcaaactgcgctaccagaagccagaggagtacgatcagctggtctggatggccattggacaccaaggtgaccactggaaggaagggcgtgtcttgctccacaagtctctgaaactttatcaggtgattttcgagggcgaaatcggaaaaggaaaccttggtgggattgctgtggatgacattagtattaataaccacatttcacaagaagattgtgcaaaaccagcagacctggataaaaagaacccagaaattaaaattgatgaaacagggagcacgccaggatacgaaggtgaaggagaaggtgacaagaacatctccaggaagccaggcaatgtgttgaagaccttagaccccatcctcatcaccatcatagccatgagtgccctgggggtcctcctgggggctgtctgtggggtcgtgctgtactgtgcctgttggcataatgggatgtcagaaagaaacttgtctgccctggagaactataactttgaacttgtggatggtgtgaagttgaaaaaagacaaactgaatacacagagtacttattcggaggcatgaaggcagacagagatgaaaagacagtcaaaggacggaagtggaaggacgggagtgagctggggagctgttgatctttcactatacaggctgggaagtgtgttgatgaccactgagccaggcttttctcaggagcttcaatgagtatggccgacagacatggacaaggagctgtgttcaccatcggactcatgtgcagtcagcttttttcctgttggtttcatttgaataatcagatgctggtgttgagaccaagtatgattgacataatcattcatttcgacccctcctgcccctctctctctctctcctctcccctttgtggattctttttggaaactgagcgaaatccaagatgctggcaccaagcgtattccgtgtggccctttggatggacatgctacctgaaacccagtgcccagaatatactagaatcaccgcatttcagtggactcctgaagttgtacttgtgtataattgcccgcgtcgtgcataggcaaagaaggattaggctgttttctttttaaagtactgtagcctcagtactggtgtagtgtgtcagctctgtttacgaagcaatactgtccagttttcttgctgtttttccggtgttgtactaaacctcgtgcttgtgaactccatacagaaaacggtgccatccctgaacacggctggccactgggtatactgctgacaaccgcaacaacaaaaacacaaatccttggcactggctagtctatgtcctctcaagtgcctttttgtttgtactggttcattgtgttacattaacgacccactctgcttcttgctggtgaaagccctgctctttaatcaaactctggtggcccactgactaagaagaaagtttattttcgtgtgagatgccagcccctccgggcaggcaagggctctgaagatttggcaacgtggcttaattgttctgctttttctgtagttcaatttcatgtttcttgacccttttgtataaagctgcaatattctctcttattgttctttcatatggaatgtattttcaaatgtaaactctcttctctttctctctcctatctctctgtcttttttctctcttagaattggaggatttgccattgtccaggaaagaaacttgcagctttaacctgctgggaatggcaaacgattttactagactttatgtttaaaaataaataaataagggaaattcctaactttgccctccaaagtctaactttggttttcttgttaactggttaaagtgacagtatcttttttccttatctattctattcaaaatgacctttgatagaaatgttggcatttagtagaaatagtgataagttgaggaaagaaataatataaattggctttcaagtgagacccaaaggaagaactggataaaatcttccaaatccaaaagcatgagatttttctatccaaatatgcaaaaatgacccaagagaactttcttattttgctactgagtcacacaagggaagtggaaggaagaacagttaatttaagaatgaaactataaatcctgatgcctgggggtcaagtattttaagataagagggggaaaaacacataaagtcaaaacaaatgttttaaaaattcataacagcaaccttgaaaaaatagacttaaatgaatgcttctagaaacttccagcggctcacaaagaataagcctgccttagggctggcaacatctaagcctctaacagcacagggaagcaaatatcttaccaggcagcctatgaattaacccaaagaagctttggttggttttggtggatttttatcatgccatgttggacatgagattttttagatcttccttcccacattgctagacgtctcactcaaagacatttgttgggagtcacatttgcatcatagatgagacagtccattcatcttagttaaattggattgagaatgccttttgtttccaggaaaatattgatcaccatgaaagaagaatagttttttgtccccagagacattcatttagttgatataatcctaccagaaggaaagcactaagaaacactcgtttgttgtttttaaaggcaacagacttaaagttgtcctcagccaaggaaaaatgatactgcaactttaaaatttaaagtatcttgcactgataaatatatttaaaaattgtatgtttataaagttattaatttgtaaaggcagtgttacaaaatgttcagtttatattgttttagattgttttgtaatttttaaaggtgtaaaataacatattttttctttatggaaatctataaaactttctgtagtaaaatgttttcattttactggtatattattgcttcatgttttgtaccatcataagattttgtgcagattttttttacagaaattattattttctatgacaatatgacacttgtaaattgttgtttcaaaatgaacagcgaagccttaactttaaatgacatttgtattctcagacactgagtagcataaaaaccacatagaactgaactgtaacttaaattccaaactatgactactacattccaaagaaacagttgaattaaacattttcataaaatatccaaaaa

SEQ ID NO: 226 - DNA, 6160 bp, Homo sapiens
  misc_feature: Incyte ID No: 464689.64
ggttccacctcctaaataaggatgtcggcgtacgttgccgtgtgggcggctgtgccagggacatgacttagcaaagacgcggctcttaggcccatgctcgcactgagctggtgacttaagcgaagatgtggccctcgggcctgtgcctggcacagagccggcactgcatggacgtgagctaaaatttgcgaaggcaggaggactcgggctgatggcagcgggtggccccgcgaggctgacgtgccacagtctaggcagggctcagggaagaactggccttgtctcctcacctagctgtgcatttcctggtcttgtagccatagaagctaactaagcctttttgggaaagaaattgaattttttcattttaatttaaaaagaagctttatccatagcccaatgtcagcccaaggggacacatgctgtggtggaccctatggggctaagaatgagctaccctgagctagaagtgattgactgttttaacaacttggaggccaaaggacagggaagcatgagtgttgaacggtgtcggtgtcggcagcatccccggcgccctgctgcggtcgccgcgagcctcggcctctgtctcctccccctcccgcccttacctccacgcgggaccgcccgcgccagtcaactcctcgcactttgcccctgcttggcagcggataaaagggggctgaggaaataccggacacggtcacccgttgccagctctagcctttaaattcccggctcggggacctccacgcaccgcggctagcgccgacaaccagctagcgtgcaaggcgccgcggctcagcgcgtaccggcgggcttcgaaaccgcagtcctccggcgaccccgaactccgctccggagcctcagccccctggaaagtgatcccggcatcggagagccaagatgccggcccacttgctgcaggacgatatctctagctcctataccaccaccaccaccattacagcgcctccctccagggtcctgcagaatggaggagataagttggagacgatgcccctctacttggaagacgacattcgccctgatataaaagatgatatatatgaccccacctacaaggataaggaaggcccaagccccaaggttgaatatgtctggagaaacatcatccttatgtctctgctacacttgggagccctgtatgggatcactttgattcctacctgcaagttctacacctggctttggggggtattctactattttgtcagtgccctgggcataacagcaggagctcatcgtctgtggagccaccgctcttacaaagctcggctgcccctacggctctttctgatcattgccaacacaatggcattccagaatgatgtctatgaatgggctcgtgaccaccgtgcccaccacaagttttcagaaacacatgctgatcctcataattcccgacgtggctttttcttctctcacgtgggttggctgcttgtgcgcaaacacccagctgtcaaagagaaggggagtacgctagacttgtctgacctagaagctgagaaactggtgatgttccagaggaggtactacaaacctggcttgctgatgatgtgcttcatcctgcccacgcttgtgccctggtatttctggggtgaaacttttcaaaacagtgtgttcgttgccactttcttgcgatatgctgtggtgcttaatgccacctggctggtgaacagtgctgcccacctcttcggatatcgtccttatgacaagaacattagcccccgggagaatatcctggtttcacttggagctgtgggtgagggcttccacaactaccaccactcctttccctatgactactctgccagtgagtaccgctggcacatcaacttcaccacattcttcattgattgcatggccgccctcggtctggcctatgaccggaagaaagtctccaaggccgccatcttggccaggattaaaagaaccggagatggaaactacaagagtggctgagtttggggtccctcaggttcctttttcaaaaaccagccaggcagaggttttaatgtctgtttattaactactgaataatgctaccaggatgctaaagatgatgatgttaacccattccagtacagtattcttttaaaattcaaaagtattgaaagccaacaactctgcctttatgatgctaagctgatattatttcttctcttatcctctctctcttctaggcccattgtcctccttttcactttattgctatcgccctcctttcccttattgcctcccaggcaagcagctggtcagtctttgctcagtgtccagcttccaaagcctagacaacctttctgtagcctaaaacgaatggtctttgctccagataactctctttccttgagctgttgtgagctttgaagtaggtggcttgagctagagataaaacagaatcttctgggtagtcccctgttgattatcttcagcccaggcttttgctagatggaatggaaaagcaacttcatttgacacaaagcttctaaagcaggtaaattgtcgggggagagagttagcatgtatgaatgtaaggatgagggaagcgaagcaagaggaacctctcgccatgatcagacatacagctgcctacctaatgaggacttcaagccccaccacatagcatgcttcctttctctcctggctcggggtaaaaagtggctgcggtgtttggcaatgctaattcaatgccgcaacatatagttgaggccgaggataaagaaaagacattttaagtttgtagtaaaagtggtctctgctggggaagggttttcttttctttttttctttaataacaaggagatttcttagttcatatatcaagaagtcttgaagttgggtgtttccagaattggtaaaaacagcagctcatagaattttgagtattccatgagctgctcattacagttctttcctctttctgctctgccatcttcaggatattggttcttcccctcatagtaataagatggctgtggcatttccaaacatccaaaaaaagggaaggatttaaggaggtgaagtcgggtcaaaaataaaatatatatacatatatacattgcttagaacgttaaactattagagtatttcccttccaaagagggatgtttggaaaaaactctgaaggagaggaggaattagttgggatgccaatttcctctccactgctggacatgagatggagaggctgagggacaggatctataggcagcttctaagagcgaacttcacataggaagggatctgagaacacgttgccaggggcttgagaaggttactgagtgagttattgggagtcttaataaaataaactagatattaggtccattcattaattagttccagtttctccttgaaatgagtaaaaactagaaggcttctctccacagtgttgtgccccttcactcatttttttttgaggagaagggggtctctgttaacatctagcctaaagtatacaactgcctggggggcagggttaggaatctcttcactaccctgattcttgattcctggctctaccctgtctgtcccttttctttgaccagatctttctcttccctgaacgttttcttctttccctggacaggcagcctcctttgtgtgtattcagaggcagtgatgacttgctgtccaggcagctccctcctgcacacagaatgctcagggtcactgaaccactgcttctcttttgaaagtagagctagctgccactttcacgtggcctccgcagtgtctccacctacacccctgtgctcccctgccacactgatggctcaagacaaggctggcaaaccctcccagaaacatctctggcccagaaagcctctctctccctccctctctcatgaggcacagccaagccaagcgctcatgttgagccagtgggccagccacagagcaaaagagggtttattttcagtcccctctctctgggtcagaaccagagggcatgctgaatgccccctgcttacttggtgagggtgccccgcctgagtcagtgctctcagctggcagtgcaatgcttgtagaagtaggaggaaacagttctcactgggaagaagcaagggcaagaacccaagtgcctcacctcgaaaggaggccctgttccctggagtcagggtgaactgcaaagctttggctgagacctgggatttgagataccacaaaccctgctgaacacagtgtctgttcagcaaactaaccagcattccctacagcctagggcagacaatagtatagaagtctggaaaaaaacaaaaacagaatttgagaaccttggaccactcctgtccctgtagctcagtcatcaaagcagaagtctggctttgctctattaagattggaaatgtacactaccaaacactcagtccactgttgagccccagtgctggaagggaggaaggcctttcttctgtgttaattgcgtagaggctacaggggttagcctggactaaaggcatccttgtcttttgagctattcacctcagtagaaaaggatctaagggaagatcactgtagtttagttctgttgacctgtgcacctaccccttggaaatgtctgctggtatttctaattccacaggtcatcagatgcctgcttgataatatataaacaataaaaacaactttcacttcttcctattgtaatcgtgtgccatggatctgatctgtaccatgaccctacataaggctggatggcacctcaggctgagggccccaatgtatgtgtggctgtgggtgtgggtgggagtgtgtctgctgagtaaggaacacgattttcaagattctaaagctcaattcaagtgacacattaatgataaactcagatctgatcaagagtccggatttctaacagtccttgctttggggggtgtgctgacaacttagctcaggtgccttacatcttttctaatcacagtgttgcatatgagcctgccctcactccctctgcagaatccctttgcacctgagaccctactgaagtggctggtagaaaaaggggcctgagtggaggattatcagtatcacgatttgcaggattcccttctgggcttcattctggaaacttttgttagggctgcttttcttaagtgcccacatttgatggagggtggaaataatttgaatgtatttgatttataagtttttttttgttttttgggttaaaagatggttgtagcatttaaaatggaaaattttctccttggtttgctagtatcttgggtgtattctctgtaagtgtagctcaaataggtcatcatgaaaggttaaaaaagcgaggtggccatgttatgctggtggttaaggccagggcctctccaaccactgtgccactgacttgctgtgtgaccctgggcaagtcacttaactataaggtgcctcagttttccttctgttaaaatggggataataatactgacctacctcaaagggcagttttgaggcatgactaatgctttttagaaagcattttgggatccttcagcacaggaattctcaagacctgagtattttttataataggaatgtccaccatgaacttgatacgtccgtgtgtcccagatgctgtcattagtctatatggttctccaagaaactgaatgaatccattggagaagcggtggataactagccagacaaaatttgagaatacataaacaacgcattgccacggaaacatacagaggatgccttttctgtgattgggtgggatttttttccctttttatgtgggatatagtagttacttgtgacaagaataattttggaataatttctattaatatcaactctgaagctaattgtactaatctgagattgtggtgagcagtgacgatgaggagttgtccagggacagagacgtatatgtgactacccatactcccagaaacgccagggatgagggcgctacaggcctcaggccctcaggtactgtcagttgtcccatctgcatggactggatactcagaggtaagtaaaccaagctgtatcttccaggcttctggtttctaaacttcactgaaagaattggatgagacaggatcttccccctcggtgggattggacacccctactcacagtcatgcctgggccctcacttattgcagatctgcctgtgaggggagaatgtgcc

SEQ ID NO: 227 - DNA, 1779 bp, Homo sapiens
  misc_feature: Incyte ID No: 334388.7
  unsure 1707: a, t, c, g, or other
acgtgagctagctggcatggcggcctgcattgcagcggggcactgggctgcaatgggcctaggccggagtttccaagccgccaggactctgctccccccgccggcctctatcgcctgcagggtccacgcggggcctgtccggcagcagagcactgggccttccgagcccggtgcgttccaaccgccgccgaaaccggtcatcgtggacaagcaccgccccgtggaaccggaacgcaggttcttgagtcctgaattcattcctcgaaggggaagaacagatcctctgaaatttcaaatagaaagaaaagatatgttagaaaggagaaaagtactccacattccagagttctatgttggaagtattcttcgtgttactacagctgacccatatgccagtggaaaaatcagccagtttctggggatttgcattcagagatcaggaagaggacttggagctactttcatccttaggaatgttatcgaaggacaaggtgtcgagatttgctttgaactttataatcctcgggtccaggagattcaggtggtcaaattagagaaacggctggatgatagcttgctatacttacgagatgcccttcctgaatatagcacttttgatgtgaatatgaagccagtagtacaagagcctaaccaaaaagttcctgttaatgagctgaaagtaaaaatgaagcctaagccctggtctaaacgctgggaacgtccaaattttaatattaaaggaatcagatttgatctttgtttaactgaacagcaaatgaaagaagctcagaagtggaatcagccatggcttgaatttgatatgatgagggaatatgatacttcaaaaattgaagctgcaatatggaaggaaattgaagcgtcgaaaaggtcttgattctgagaatgaatttggttagttgcagaagatacattggctctaagaggatatattttgagaccaatttaatttcatttataagaacatagtaattaagtgaactaagcattcattgttttattaatactttttttctaaaataaaacttgtacaccagtttattactctaaaaagagaattacacatgccaaatggaccaatgtccatttgcttattggaggcaaagctacaatagaagtcagagcatcaccagaatggtctttaatgagcatggaacctgagcaaagggaataggtgggatgaattttttttttaattgtgaaacaattcataagcacaatatgatttacagaataataaacattcatgtacccactatcaggttaagaaatagaacatttattaatatgtaggaatgttaagaaataaaacatttaataagatctcagaagactccagtaaatctgcaattgtatctctctcctttttaaatgtaaatatcatcttgacttgttaattattcccttgcatttcttttagtttactgccaacacatatattcttcaacaatatatttaattttgaaaaacctgaaaaaaaaaaacctgttagcaagtataaaggggcagtattactattattgcatgaaggcttcaagggaaacgttacagtctttgggtcatagtctggcttcagcttcctctgagagtttacagaggccaatttttgaggcaaattcatgggctaaggtttatggagtggagttcttgccaaaacaggaaagggctcaccaacaagggtgatctggngcaggggtttattactgggggatacctgggattgttcgcaagaaattggtgggttaggaggggaaagtaaac

SEQ ID NO: 228 - DNA, 1577 bp, Homo sapiens
  misc_feature: Incyte ID No: 994660.1
cccgccgccgcccggcccgcgcccatgcaggccatcaagtgcgtggtggtcggcgacgggtgagtgcgcggcccggaggccgcttggctgggctgggcgggaggggggctcgggggctcggggcgcagccggggcggggcgggggtggcgcccgggtcctcgcgaggcggccccgccgtaccccgcccgagccgcgtgcgccccggggtcgaggagggcggggtggggcggggctggggtccgcgggcctccagctcgggcccacctgatgctgcccggctcccgcttgggctggctgcgggcgaggcggggccgccgccctgtcctcccagtgggtggggccaggcctctcacctgggctgaaccctcagccggccccaccctctcctgccgccaccctcggagtcggggcctctgcctggggccccagtgtggggcgccctgcgcccttattcaccaccccagcccccggagcccggcctgcccaggtcgtcctccagccttaggtcgccacggatctggtgggctgggtccccctctcgaccccagacgcccctaactcgcctctggctccgggagagggggctgcccttgctgggcagagggtccgaggccgggcccgggagccacgtggcttgccctgtccgcagcgccgtggggaagacatgcttgctgatcagctacacgaccaacgccttccccggagagtacatccccaccgtttttgacaactactctgccaacgtgatggtggacgggaaaccagtcaacttggggctgtgggacacagcgggtcaggaggactacgatcggctgcggccactctcctacccccaaactgacgtctttctgatctgcttctctctggtgagcccggcctccttcgagaatgttcgtgccaagtggtacccggaggtgcggcaccactgcccccacacgcccatcctcctggtgggcaccaagctggacctccgcgacgacaaggacaccattgagcggctgcgggacaagaagctggcacccatcacctacccacagggcctggccatggcccgggagattggtgggctctgtgaaatacctggagtgctcagccctgacccagcggggcctgaagacagtgtttgacgaggcgatccgcgcggtgctctgcccgcccccagtgaagaagccggggaagaagtgcaccgtcttctagagccctggcccacccgagcctgagggctggcggggagcagccctggacgtgtccgctgttgtgttgagacgtgtggtgtccctgagtcggctgtggggagcggtgggggtgggccggggggaagcatggggatgaggctgggtggcaggatcctgtcctctctgccgcctcattctggggtgtggctccagccttccctggcccccgccggaggccgggagggagcagggtctccctcagggctgcaggggcaggtgcagggaagccccaggatgggcttccctggagggggagggtgggggggagttctgttccttgtgccccgaggtggggcagccccttctcattttatacaataaacattctccacctacaaaaa

SEQ ID NO: 229 - DNA, 4302 bp, Homo sapiens
  misc_feature: Incyte ID No: 3147649cB1
cctgtcttgaggtctaatggcggacgccagtatgttggagttggtggtggcttaagttttgaagggaggtagcatccgttggatatccacaccatccttctcgctgcaggctttcttggactccgtactgttggtgtaaccaaggcctggaggtctgggtggctcaggtttcctgcagccatgtttctgtacaacttaaccttgcagagagccactggcatcagctttgccattcatggaaacttttctggaaccaaacaacaagaaattgttgtttcccgtgggaagatcttggagctgcttcgcccagaccccaacactggcaaagtacataccctactcactgtggaagtattcggtgttatccggtcactcatggcctttaggctgacaggtggcaccaaagactacattgtagttggcagtgactctggtcgaattgttattttggaataccagccatctaagaatatgtttgagaagattcaccaagaaacctttggcaagagtggatgccgtcgcatcgttcctggccagttcttagctgtggatcccaaagggcgagccgttatgattagtgccattgagaaacagaaattggtgtatattttgaacagagatgctgcagcccgacttaccatttcatctcccctggaagcccacaaagcaaacactttagtgtatcatgtagttggagtagatgtcggatttgaaaatccaatgtttgcttgtctggaaatggattatgaggaagcagacaatgatccaacaggggaagcagcagctaatacccagcagacacttactttctatgagctagaccttggtttaaatcatgtggtccgaaaatacagtgaacctttggaggaacacggcaacttccttattacagttccaggagggtcagatggtccaagtggagtactgatctgctctgaaaactatattacttacaagaactttggtgaccagccagatatccgctgtccaattcccaggaggcggaatgacctggatgaccctgaaagaggaatgatttttgtctgctctgcaacccataaaaccaaatcgatgttcttctttttggctcaaactgagcagggagatatctttaagatcactttggagacagatgaagatatggttactgagatccggctcaaatattttgatactgtacccgttgctgctgccatgtgtgtgcttaaaacagggttcctttttgtagcatcagaatttggaaaccattacttatatcaaattgcacatcttggagatgatgatgaagaacctgagttttcatcagccatgcctctggaagaaggagacacattcttttttcagccaagaccacttaaaaaccttgtgctggttgatgagttggacagcctctctcccattctgttttgccagatagctgatctggccaatgaagatactccacagttgtatgtggcctgtggtaggggaccccgatcatctctgagagtcctaagacatggacttgaggtgtcagaaatggctgtttctgagctacctggtaaccccaacgctgtctggacagtgcgtcgacacattgaagatgagtttgatgcctacatcattgtgtctttcgtgaatgccaccctagtgttgtccattggagaaactgtagaagaagtgactgactctgggttcctggggaccaccccgaccttgtcctgctccttattaggagatgatgccttggtgcaggtctatccagatggcattcggcacatacgagcagacaagagagtcaatgagtggaagacccctggaaagaaaacaattgtgaagtgtgcagtgaaccagcgacaagtggtgattgccctgacaggaggagagctggtctatttcgagatggatccttcaggacagctgaatgagtacacagaacggaaggagatgtcagcagatgtggtgtgcatgagtctggccaatgtaccccctggagagcagcggtctcgcttcctggctgtggggcttgtggacaacactgtcagaatcatctccctggatccctcagactgtttgcaacctctaagcatgcaggctctcccagcccagcctgagtccttgtgtatcgtggaaatgggtgggactgagaagcaggatgagctgggtgagaggggctcgattggcttcctatacctgaatattgggctacagaacggtgtgctgctgaggactgtcttggaccctgtcactggggatttgtctgatactcgcactcggtacctggggtcccgtcctgtgaagctcttccgagtccgaatgcaaggccaggaggcagtattggccatgtcaagccgctcatggttgagctattcttaccaatctcgcttccatctcaccccactgtcttacgagacactggaatttgcatcgggttttgcctcggaacagtgtcccgagggcattgtggccatctccaccaacaccctacggattttggcattagagaagctcggtgctgtcttcaatcaagtagccttcccactgcagtacacacccaggaaatttgtcatccaccctgagagtaacaaccttattatcattgaaacggaccacaatgcctacactgaggccacgaaagctcagagaaagcagcagatggcagaggaaatggtggaagcagcaggggaggatgagcgggagctggccgcagagatggcagcagcattcctcaatgaaaacctccctgaatccatctttggagctcccaaggctggcaatgggcagtgggcctctgtgatccgagtgatgaatcccattcaagggaacacactggaccttgtccagctggaacagaatgaggcagcttttagtgtggctgtgtgcaggttttccaacactggtgaagactggtatgtgctggtgggtgtggccaaggacctgatactaaacccccgatctgtggcagggggcttcgtctatacttacaagcttgtgaacaatggggaaaaactggagtttttgcacaagactcctgtggaagaggtccctgctgctattgccccattccaggggagggtgttgattggtgtggggaagctgttgcgtgtctatgacctgggaaagaagaagttactccgaaaatgtgagaataagcatattgccaattatatctctgggatccagactatcggacatagggtaattgtatctgatgtccaagaaagtttcatctgggttcgctacaagcgtaatgaaaaccagcttatcatctttgctgatgatacctacccccgatgggtcactacagccagcctcctggactatgacactgtggctggggcagacaagtttggcaacatatgtgtggtgaggctcccacctaacaccaatgatgaagtagatgaggatcctacaggaaacaaagccctgtgggaccgtggcttgctcaatggggcctcccagaaggcagaggtgatcatgaactaccatgtcggggagacggtgctgtccttgcagaagaccacgctgatccctggaggctcagaatcacttgtctataccaccttgtctggaggaattggcatccttgtgccattcacgtcccatgaggaccatgacttcttccagcatgtggaaatgcacctgcggtctgaacatccccctctctgtgggcgggaccacctcagctttcgctcctactacttccctgtgaagaatgtgattgatggagacctctgtgagcagttcaattccatggaacccaacaaacaaaagaacgtctctgaagaactggaccgaaccccacccgaagtgtccaagaaactcgaggatatccggacccgctacgccttctgagccctcctttcccggtggggcttgccagagactgtgtgttttgtttcccccaccaccatcactgccacctggcttctgccatgtggcaggagggtgactggataattaagactgcattatgaaagtcaacagctctttcccctcagctcttctcctggaatgactggcttcccctcaaattggcactgagatttgctacacttctccccacctggtacatgatacatgaccccaggttccagtgtagaacctgagtcccccattccccaaagccatccctgcattgatatgtcttgactctcctgtctacttttgcacacacccttaatttttaattggttttcttgtaaatacagttttgtacaatgttatctctgtgggaggaaggaggcaggctgtggtgggactgggtagggtatagtatcactcctgagttccactgctctagaatctaaccagaaatagcgc

SEQ ID NO: 230 - DNA, 2164 bp, Homo sapiens
  misc_feature: Incyte ID No: 2652949cB1
gatgccaccaaaaagaaatgaaaaatacaaacttcctattccatttccagaaggcaaggttctggatgatatggaaggcaatcagtgggtactgggcaagaagattggctctggaggatttggattgatatatttagctttccccacaaataaaccagagaaagatgcaagacatgtagtaaaagtggaatatcaagaaaatggcccgttattttcagaacttaaattttatcagagagttgcaaaaaaagactgtatcaaaaagtggatagaacgcaaacaacttgattatttaggaattcctctgttttatggatctggtctgactgaattcaagggaagaagttacagatttatggtaatggaaagactaggaatagatttacagaagatctcaggccagaatggtacctttaaaaagtcaactgtcctgcaattaggtatccgaatgttggatgtactggaatatatacatgaaaatgaatatgttcatggtgatataaaagcagcaaatctacttttgggttacaaaaatccagaccaggtttatcttgcagattatggactttcctacagatattgtcccaatgggaaccacaaacagtatcaggaaaatcctagaaaaggccataatgggacaatagagtttaccagcttggatgcccacaagggagtagccttgtccagacgaagtgacgttgagatcctcggctactgcatgctgcggtggttgtgtgggaaacttccctgggaacagaacctgaaggaccctgtggctgtgcagactgctaaaacaaatctgttggacgagctcccccagtcagtgcttaaatgggctccttctggaagcagttgctgtgaaatagcccaatttttggtatgtgctcatagtttagcatatgatgaaaagccaaactatcaagccctcaagaaaattttgaaccctcatggaatacctttaggaccactggacttttccacaaaaggacagagtataaatgtccatactccaaacagtcaaaaagttgattcacaaaaggctgcaacaaagcaagtcaacaaggcacacaataggttaatcgaaaaaaaagtccacagtgagagaagcgctgagtcctgtgcaacatggaaagtgcagaaagaggagaaactgattggattgatgaacaatgaagcagctcaggaaagcacaaggagaagacagaaatatcaagagtctcaagaacctttgaatgaagtaaacagtttcccacaaaaaatcagctatacacaattcccaaactcattttatgagcctcatcaagattttaccagtccagatatattcaagaagtcaagatctccatcttggtataaatacacttccacagtcagcacggggatcacagacttagaaagttcaactggactttggcctacaatttcccagtttactcttagtgaagagacaaacgcagatgtttattattatcgcatcatcatacctgtccttttgatgttagtatttcttgctttattttttctctgaagatgataccaaaattccttttgataattttttaagtttccagctcttcaccgaaatgttgtattcttatttcagtgtttccttccagacatttttaaggtaattggctttaaaaagagaacatattttaacaaagtttgtggacactctaaaaaataaaattgctttgtactagaaatagtgtcatagaatagtgtcatagtacagtttggaaaacacttctgaagtttcagatcacctaggaaatctagaaaaggagtttaatgtttttgatcagagaatttgaaaaatagaaatacagagaatgagtttcaaaagttttagataaactgatatactatatagatctatcttctagaacatattactgaaagctaggcacattttatgagatgtgattaacaatttgcttaccttactacaatatggacattcaccaaatatgatgttaaaactctgtctactagttagtagtcctctcagccactgcaaattttaaaagataaaggagaagcgtcagcatgattacaaattacagatactccaaatgtcattccctttgtttttaagtgcattatgtttttattccagaagacttagcttaattttgttttgcaagagtaagggatgtatttc

SEQ ID NO: 231 - DNA, 6886 bp, Homo sapiens
  misc_feature: Incyte ID No: 350300.25
tcgaccgcccagccaggtgcaaaatgccgtgtcattgggagactccgcagccggagcattagattacagctcgacggagctcgggaagggcggcgggggtggaagatgagcagaagcccctgttctcggaacgccggctgacaagcggggtgagcgcagccggggcggggacccagcctagcccactggagcagccgggggtggcccgttcccctttaagagcaactgctctaagccaggagccagagattcgagccggcctcgcccagccagccctctccagcgaggggacccacaagcggcgcctcggccctcccgacctttccgagccctctttgcgccctgggcgcacggggccctacacgcgccaagcatgctgagggtcttcatcctctatgccgagaacgtccacacacccgacaccgacatcagcgatgcctactgctccgcggtgtttgcaggggtgaagaagagaaccaaagtcatcaagaacagcgtgaaccctgtatggaatgagggatttgaatgggacctcaagggcatccccctggaccagggctctgagcttcatgtggtggtcaaagaccatgagacgatggggaggaacaggttcctgggggaagccaaggtcccactccgagaggtcctcgccacccctagtctgtccgccagcttcaatgcccccctgctggacaccaagaagcagcccacaggggcctcgctggtcctgtaggtgtcctacacaccgctgcctggagctgtgcccctgttcccgccccctactcctctggagccctccccgactctgcctgacctggatgtagtggcagacacaggaggagaggaagacacagaggaccagggactcactggagatgaggcggagccattcctggatcaaagcggaggcccgggggctcccaccaccccaaggaaactaccttcacgtcctccgccccactaccccgggatcaaaagaaagcgaagtgcgcctacatctagaaagctgctgtcagacaaaccgcaggatttccagatcagggtccaggtgatcgaggggcgccagctgccgggggtgaacatcaagcctgtggtcaaggttaccgctgcagggcagaccaagcggacgcggatccacaagggaaacagcccactcttcaatgagactcttttcttcaacttgtttgactctcctggggagctgtttgatgagcccatctttatcacggtggtagactctcgttctctcaggacagatgctctcctcggggagttccggatggacgtgggcaccatttacagagagccccggcacgcctatctcaggaagtggctgctgctctcagaccctgatgacttctctgctggggccagaggctacctgaaaacaagcctttgtgtgctggggcctggggacgaagcgcctctggagagaaaagacccctctgaagacaaggaggacattgaaagcaacctgctccggcccacaggcgtagccctgcgaggagcccacttctgcctgaaggtcttccgggccgaggacttgccgcagatggacgatgccgtgatggacaacgtgaaacagatctttggcttcgagagtaacaagaagaacttggtggacccctttgtggaggtcagctttgcggggaaaatgctgtgcagcaagatcttggagaagacggccaaccctcagtggaaccagaacatcacactgcctgccatgtttccctccatgtgcgaaaaaatgaggattcgtatcatagactgggaccgcctgactcacaatgacatcgtggctaccacctacctgagtatgtcgaaaatctctgcccctggaggagaaatagaagaggagcctgcaggtgctgtcaagccttcgaaagcctcagacttggatgactacctggggcttcctccccacttttgggccctgctacatcaacctctatggcagtcccagagagttcacaggcttcccagacccctacacagagctcaacacaggcaagggggaaggtgtggcttatcgtggccggcttctgctctccctggagaccaagctggtggagcacagtgaacagaaggtggaggaccttcctgcggatgacatcctccgggtggagaagtaccttaggaggcgcaagtactccctgtttgcggccttctactcagccaccatgctgcaggatgtggatgacgccatccagtttgaggtcagcatcgggaactacgggaacaagttcgacatgacctgcctgccgctggcctccaccactcagtacagccgtgcagtctttgacgggtgccactactactacctaccctggggtaacgtgaaacctgtggtggtgctgtcatcctactgggaggacatcagccatagaatcgagactcagaaccagctgcttgggattgctgaccggctggaagctggcctggagcaggtccacctggccctgaaggcgcagtgctccacggaggacgtggactcgctggtggctcagctgacggatgagctcatcgcaggctgcagccagcctctgggtgacatccatgagacaccctctgccacccacctggaccagtacctgtaccagctgcgcacccatcacctgagccaaatcactgaggctgccctggccctgaagctcggccacagtgagctccctgcagctctggagcaggcggaggactggctcctgcgtctgcgtgccctggcagaggagccccagaacagcctgccggacatcgtcatctggatgctgcagggagacaagcgtgtggcataccagcgggtgcccgcccaccaagtcctcttctcccggcggggtgccaactactgtggcaagaattgtgggaagctacagacaatctttctgaaatatccgatggagaaggtgcctggcgcccggatgccagtgcagatacgggtcaagctgtggtttgggctctctgtggatgagaaggagttcaaccagtttgctgaggggaagctgtctgtctttgctgaaacctatgagaacgagactaagttggcccttgttgggaactggggcacaacgggcctcacctaccccaagttttctgacgtcacgggcaagatcaagctacccaaggacagcttccgcccctcggccggctggacctgggctggagattggttcgtgtgtccggagaagactctgctccatgacatggacgccggtcacctgagcttcgtggaagaggtgtttgagaaccagacccggcttcccggaggccagtggatctacatgagtgacaactacaccgatgtgaacggggagaaggtgcttcccaaggatgacattgagtgcccactgggctggaagtgggaagatgaggaatggtccacagacctcaaccgggctgtcgatgagcaaggctgggagtatagcatcaccatccccccggagcggaagccgaagcactgggtccctgctgagaagatgtactacacacaccgacggcggcgctgggtgcgcctgcgcaggagggatctcagccaaatggaagcactgaaaaggcacaggcaggcggaggcggagggcgagggctgggagtacgcctctctttttggctggaagttccacctcgagtaccgcaagacagatgccttccgccgccgccgctggcccgtcgcatggagccactggagaagacggggcctgcagctgtgtttgcccttgagggggccctgggcggcgtgatggatgacaagagtgaagattccatgtccgtctccaccttgagcttcggtgtgaacagacccacgatttcctgcatattcgactatgggaaccgctaccatctacgctgctacatgtaccaggcccgggacctggctgcgatggacaaggactctttttctgatccctatgccatcgtctccttcctgcaccagagccagaagacggtggtggtgaagaacacccttaaccccacctgggaccagacgctcatcttctacgagatcgagatctttggcgagccggccacagttgctgagcaaccgcccagcattgtggtggagctgtacgaccatgacacttatggtgcagacgagtttatgggtcgctgcatctgtcaaccgagtctggaacggatgccacggctggcctggttcccactgacgaggggcagccagccgtcgggggagctgctggcctcttttgagctcatccagagagagaagccggccatccaccatattcctggttttgaggtgcaggagacatcaaggatcctggatgagtctgaggacacagacctgccctacccaccaccccagagggaggccaacatctacatggttcctcagaacatcaagccagcgctccagcttaccgccatcgagatcctggcatggggcctgcggaacatgaagagttaccagctggccaacatctcctcccccagcctcgtggtagagtgtgggggccagacggtgcagtcctgtgtcatcaggaacctccggaagaaccccaactttgacatctgcaccctcttcatggaagtgatgctgcccagggaggagctctactgcccccccatcaccgtcaaggtcatcgataaccgccagtttggccgccggcctgtggtgggccagtgtaccatccgctccctggagagcttcctgtgtgacccctactcggcggagagtccatccccacagggtggcccagacgatgtgagcctactcagtcctggggaagacgtgctcatcgacattgatgacaaggagcccctcatccccatccaggaggaagagttcatcgattggtggagcaaattctttgcctccataggggagagggaaaagtgcggctcctacctggagaaggattttgacaccctgaaggtctatgacacacagctggagaatgtggaggcctttgagggcctgtctgacttttgtaacaccttcaagctgtaccggggcaagacgcaggaggagacagaagatccatctgtgattggtgaatttaagggcctcttcaaaatttatcccctcccagaagacccagccatccccatgcccccaagacagttccaccagctggccgcccagggaccccaggagtgcttggtccgtatctacattgtccgagcatttggcctgcagcccaaggaccccaatggaaagtgtgatccttacatcaagatctccatagggaagaaatcagtgagtgaccaggataactacatcccctgcacgctggagcccgtatttggaaagatgttcgagctgacctgcactctgcctctggagaaggacctaaagatcactctctatgactatgacctcctctccaaggacgaaaagatcggtgagacggtcgtcgacctggagaacaggctgctgtccaagtttggggctcgctgtggactcccacagacctactgtgtctctggaccgaaccagtggcgggaccagctccgcccctcccagctcctccacctcttctgccagcagcatagagtcaaggcacctgtgtaccggacagaccgtgtaatgtttcaggataaagaatattccattgaagagatagaggctggcaggatcccaaacccacacctgggcccagtggaggagcgtctggctctgcatgtgcttcagcagcagggcctggtcccggagcacgtggagtcacggcccctctacagccccctgcagccagacatcgagcaggggaagctgcagatgtgggtcgacctatttccgaaggccctggggcggcctggacctcccttcaacatcaccccacggagagccagaaggtttttcctgcgttgtattatctggaataccagagatgtgatcctggatgacctgagcctcacgggggagaagatgagcgacatttatgtgaaaggttggatgattggctttgaagaacacaagcaaaagacagacgtgcattatcgttccctgggaggtgaaggcaacttcaactggaggttcattttccccttcgactacctgccagctgagcaagtctgtaccattgccaagaaggatgccttctggaggctggacaagactgagagcaaaatcccagcacgagtggtgttccagatctgggacaatgacaagttctcctttgatgattttctgggctccctgcagctcgatctcaaccgcatgcccaagccagccaagacagccaagaagtgctccttggaccagctggatgatgctttccacccagaatggtttgtgtccctttttgagcagaaaacagtgaagggctggtggccctgtgtagcagaagagggtgagaagaaaatactggcgggcaagctggaaatgaccttggagattgtagcagagagtgagcatgaggagcggcctgctggccagggccgggatgagcccaacatgaaccctaagcttgaggacccaaggcgccccgacacctccttcctgtggtttacctccccatacaagaccatgaagttcatcctgtggcggcgtttccggtgggccatcatcctcttcatcatcctcttcatcctgctgctgttcctggccatcttcatctacgccttcccgaactatgctgccatgaagctggtgaagcccttcagctgaggactctcctgccctgtagaaggggccgtggggtcccctccagcatgggactggcctgcctcctccgcccagctcggcgagctcctccagacctcctaggcctgattgtcctgccagggtgggcagacagacagatggaccggcccacactcccagagttgctaacatggagctctgagatcaccccacttccatcatttccttctcccccaacccaacgcttttttggatcagctcagacatatttcagtataaaacagttggaaccac

SEQ ID NO: 232 - DNA, 4024 bp, Homo sapiens
  misc_feature: Incyte ID No: 1273213cB1
cccgggtatcaaaagaaggatcggctccgcccccgggctccccgggggagttgatagaagggtccttcccaccctttgccgtccccactcctgtgcctacgacccaggagcgtgtcagccaaagcatggagaatcaagagaaggcgagtatcgcgggccacatgttcgacgtagtcgtgatcggaggtggcatttcaggactatctgctgccaaactcttgactgaatatggcgttagtgttttggttttagaagctcgggacagggttggaggaagaacatatactataaggaatgagcatgttgattacgtagatgttggtggagcttatgtgggaccaacccaaaacagaatcttacgcttgtctaaggagctgggcatagagacttacaaagtgaatgtcagtgagcgtctcgttcaatatgtcaaggggaaaacatatccatttcggggcgcctttccaccagtatggaatcccattgcatatttggattacaataatctgtggcggacaatagataacatggggaaggagattccaactgatgcaccctgggaggctcaacatgctgacaaatgggacaaaatgaccatgaaagagctcattgacaaaatctgctggacaaagactgctaggcggtttgcttatctttttgtgaatatcaatgtgacctctgagcctcacgaagttcttgccctgtggttcttgtggtatgtgaagcagtgcgggggcaccactcggatattctctgtcaccaatggtggccaggaacggaagtttgtaggtggatctggtcaagtgagcgaacggataatggacctcctcggagaccaagtgaagctgaaccatcctgtcactcacgttgaccagtcaagtgacaacatcatcatagagacgctgaaccatgaacattatgagtgcaaatacgtaattaatgcgatccctccgaccttgactgccaagattcacttcagaccagagcttccagcagagagaaaccagttaattcagcgtcttccaatgggagctgtcattaagtgcatgatgtattacaaggaggccttctggaagaagaaggattactgtggctgcatgatcattgaagatgaagatgctccaatttcaataaccttggatgacaccaagccagatgggtcactgcctgccatcatgggcttcattcttgcccggaaagctgatcgacttgctaagctacataaggaaataaggaagaagaaaatctgtgagctctatgccaaagtgctgggatcccaagaagctttacatccagtgcattatgaagagaagaactggtgtgaggagcagtactctgggggctgctacacggcctacttccctcctgggatcatgactcaatatggaagggtgattcgtcaacccgtgggcaggattttctttgcgggcacagagactgccacaaagtggagcggctacatggaaggggcagttgaggctggagaacgagcagctagggaggtcttaaatggtctcgggaaggtgaccgagaaagacatctgggtacaagaacctgaatcaaaggacgttccagcggtagaaatcacccacaccttctgggaaaggaacctgccctctgtttctggcctgctgaagatcattggattttccacatcagtaactgccctggggtttgtgctgtacaaatacaagctcctgccacggtcttgaagttctgttcttatgctctctgctcactggttttcaataccaccaagaggaaaatattgacaagtttaaaggctgtgtcattgggccatgtttaagtgtactggatttaactacctttggcttaattccaatcattgttaaagtaaaaacaattcaaagaatcacctaattaatttcagtaagatcaagctccatcttatttgtcagtgtagatcaactcatgttaattgatagaataaagccttgtgatcactttctgaaattcacaaagttaaacgtgatgtgctcatcagaaacaatttctgtgtcctgtttttattcccttcaatgcaaaatacatgatgatttcagaaacaaagcatttgactttctgtctgtggaggtggagtaggtgaaggcccagcctgtaactgtcctttttcttcccttaggcaatggtgaactgtcattacagagcctagaggctcacagcctcctggaggaagcagcctccactttggatcaggaaatagtaaaggaaagcagtgttgggggtagcggcatgcagaccctcagaccagaatggggacatcttgtggtctgctgcctcaggaatctcctgaccacttgtagtccctccgacttctctagacatctagtctcagtgctagcttatttgtatttttcctctttcacttcttatggaggagagtgtttaactgagttagaatgttgaaactgacttgctgtgacttatgtgcagctttccagttgagcagaggaaaatagtggcaggactgtcccccaggaggactccctgcttagctctgtgggagaccaactacgactggcatcttctcttccccctggaaggcagctagacaccaatggatccttgtcagttgtaacattctatttcaacttcaggaaagcagcagttttcttttaatttttcctatgaccataaaattagacatacctctcaacttacatatgtcttcaacatggttacctctgcataaatattagcaaagcatgccaatttctcttaagtactgaaatacatatgataaatttgactgttatttgttgagactatcaaacagaaaagaaattagggctctaatttccttaaagcaagctcacttgctttagttgttaagttttataaaagacatgaaattgagtcattttatatatgaaaactaagttctctatcttaggagtaatgtcggcccacaagggtgcccacctcttgttttccccttttaaaaactcagatttttaaaagccctttccaaaggtttcaactgtaaaatacttctttttacaatgtatcaacatatttttatttaaggggaattaacaattgccagggaaaccagccaacccaagtttattatatcattaaccttatcataaattcaaacctaagttgctggaccctggtgtgaggacataaatcttccaaagttttgcctatcctaagagctgcatttttctactgctctttaccttgcattttagctaatttaggagttttgagaatgtattggatacgctccagtacataaggagttgccgcatattatatcagactgctttgagaaatctcatccctagtctattgcagttgtttctattagcttactgattaactcagtcctgacacaccttttgggaaatgctgatttaaacttcttaactggcaacagttggaacagtaatcagtttgctaacatatttaaagtcttgaatgttgaagaactcatgtgatttacccttttcaactttttggaaaacgatttaatttattctaattagattaaccctattaatctatggattgggtatcaaaatgaatgccagtccagatgtgcctagacacgaaattggagctgaggactctcacgatatgcaagttcatccaacgtgaagataccataagctttttctctgaaccagagaaatgaaagtcagtttaagaggctgatagatcttggccctgttaaggcatccacttcacagttctgaaggctgagtcagccccactccacagttaggccaagaattagattttaaaacttcatctgtctgtcccagttaactgttaaataaggcctcatcctccactgaagagtatggattgaaggattgtgaactatgtttagtgtgattgtgaacttggtgcctaatgttccatgtctgaagtttgccccagtgctacacgttggagtatacctatgtgtgtgctttgccactgaagtaagattttgcctgtatggtactgttttgtttgttaataaagtgcactgccacccccaatgcaaaaaaaa

SEQ ID NO: 233 - DNA, 1680 bp, Homo sapiens
  misc_feature: Incyte ID No: 222242.35
gccaggccggagcgaggcagcgcgcccggctcccgcgccatggggcggctggtggctgtgggcttgctggggatcgcgctggcgctcctgggcgagaggcttctggcactcagaaatcgacttaaagcctccagagaagtagaatctgtagaccttccacactgccacctgattaaaggaattgaagctggctctgaagatattgacatacttcccaatggtctggctttttttagtgtgggtctaaaattcccaggactccacagctttgcaccagataagcctggaggaatactaatgatggatctaaaagaagaaaaaccaagggcacgggaattaagaatcagtcgtgggtttgatttggcctcattcaatccacatggcatcagcactttcatagacaacgaattcaagaatacagtggaaatttttaaatttgaagaagcagaaaattctctgttgcatctgaaaacagtcaaacatgagcttcttccaagtgtgaatgacatcacagctgttggaccggcacatttctatgccacaaatgaccactacttctctgatcctttcttaaagtatttagaaacatacttgaacttacactgggcaaatgttgtttactacagtccaaatgaagttaaagtggtagcagaaggatttgattcagcaaatgggatcaatatttcacctgatgataagtatatctatgttgctgacatattggctcatgaaattcatgttttggaaaaacacactaatatgaatttaactcagttgaaggtacttgagctggatacactggtggataatttatctattgatccttcctcgggggacatctgggtaggctgtcatcctaatggccagaagctcttcgtgtatgacccgaacaatcctccctcgtcagaggttctccgcatccagaacattctatctgagaagcctacagtgactacagtttatgccaacaatgggtctgttctccaaggaagttctgtagcctcagtgtatgatgggaagctgctcataggcactttataccacagagccttgtattgtgaactctaaattgtacttttggcatgaaagtgcgataacttaacaattaattttctatgaattgctaattctgagggaatttaaccagcaacattgacccagaaatgtatggcatgtgtagttaattttattccagtaaggaacggcccttttagttcttagagcacttttaacaaaaaaggaaaatgaacaggttctttaaaatgccaagcaagggacagaaaagaaagctgctttcgaataaagtgaatacattttgcacaaagtaagcctcacctttgccttccaactgccagaacatggattccactgaaatagagtgaattatatttccttaaaatgtgagtgacctcacttctggcactgtgactactatggctgtttagaactactgataacgtattttgatgttttgtacttacatctttgtttaccattaaaaagttggagttatattaaagactaactaaaatcccagttttgtctgtgtttaattctgaaggcatatggctaggagaaatgggaaagcagctgcttccttatggagtttggataggcaagcatggccatattaatttctcttgtggaaagctgaaagtgaatggactcttaatttgaaac

SEQ ID NO: 234 - DNA, 1883 bp, Homo sapiens
  misc_feature: Incyte ID No: 621792cB1
gaggggagtaaagggtggcggtccgggcctggagttcagtgggtgcagcctgcttgcgagctgaggccagacaggggggcgcctacggacggaaaagaaaagttgattacaaacgggaccatattttgcttcgaaatggaaccagcagttagcgagccaatgagagaccaagtcgcacggactcatttgacagaggacactcccaaagtgaatgctgacatagaaaaggttaaccagaatcaggccaagagatgcacagtgatcgggggctctggattcctggggcagcacatggtggagcagttgctggcaagaggatatgctgtcaatgtatttgatatccagcaagggtttgataatccccaggtgcggttctttctgggtgacctctgcagccgacaggatctgtacccagctctgaaaggtgtaaacacagttttccactgtgcgtcacccccaccatccagtaacaacaaggagctcttttatagagtgaattacattggcaccaagaatgtcattgaaacttgcaaagaggctggggttcagaaactcattttaaccagcagtgccagtgtcatctttgagggcgtcgatatcaagaatggaactgaagaccttccctatgccatgaaacccattgactactacacagagactaagatcttacaggagagggcagttctgggcgccaacgatcctgagaagaatttcttaaccacagccatccgccctcatggcattttcggcccaagggacccgcagttggtacccatcctcatcgaggcagccaggaacggcaagatgaagttcgtgattggaaatgggaagaacttggtggacttcacctttgtggagaacgtggtccatggacacatcctggcggcagagcagctctcccgagactcgacactgggtgggaaggcatttcacatcaccaatgatgagcccatccctttctggacattcctgtctcgcatcctgacaggcctcaattatgaggcccccaagtaccacatcccctactgggtggcctactacctggccctcctgctatccctgctggtgatggtgatcagtcctgtcatccagctgcagcccaccttcacacccatgcgggtcgcactggctggcacattccactactacagctgcgagagagccaaaaaggccatgggctaccagccactagtgaccatggatgatgctatggagaggaccgtgcagagctttcgccacctgcggagggtcaagtgagggacactggaggctgggctctctcgacacgttgctcagccagtcactccttcccctgtggattgatgaaataacatcctttgaatgagtttgctctgagcctgtgactccttctgctaggcagagagcgcaccctactctttccgtgacgatgagggcggcaaaaacagacatttcttccttcatggaactggatttggatttcttgaagcaggcagcttcatattataccgatttgttctctgtctttttgtgtctctctgtttaccccctcccttgccccctcttctggtttatacatttcattccagtgtccttgtacataatcaaggaagctgtaggaagctacaacccatttgttagttctgatggagaaccatttccatgcagaccaatactagagtgaagcctctagactttgttcaagatactctatcttcaaaatatcccagaagaaaaacagaagctgttaacacacaggtgagactttacatatacatttcatactgacagtgagcttagagcaaaagctgaaagctgaaatgactgtaattcctccctcagtctctgttgcttgttcaactccttacatgtgtccacattctctttcaggggtaaaaaaaaaa

SEQ ID NO: 235 - DNA, 2109 bp, Homo sapiens
  misc_feature: Incyte ID No: 148820cB1
acagtgacctggctgttcacttccctgccattcagtatgctgtgctctacacattgtattctcattgtaccaggtactgtattcacaaatttttcttaagaaccccacaaaacattttatttttttaatggatagattttaaagatgtatgttgatttaactttggacttgcttgctttctttgattaaagatgaaaagataatctatgctttgtctttcaggcatgatcactttatctttagtagcctcagttcttcctctccttctttgtttgatggagctgtgattggcactgtaactatggccacaaagaaacatttctcaattatattaaatcttctgggaatgttacttaagaaagataaccaggacacgaggaaactgttaatgacttgggctttggaagtagctgttgtaatgaagaagtccgaaacatatgcacctttattctgtcttccgtctttccataaattttgcaaaggccttttagccgacactctcgttgaagatgtgaatatctgtctgcaggcatgcagcagtctacatgctctatcctcttccttgccagatgatcttttacagagatgtgttgatgtttgccgtgtccaactagtgcaccgtggaacttgtattcgacaagcatttggaaaactgttgaaatcaattcctttaggtgttttcctaagcgataacaatcacacagaaattcaagaaatttctttagcattaagaagtcacatgagtaaagcaccaagtaatacattccacccccaagatttctctgatgttattagttttattttgtatgggaactctcatagaacagggaaggacaattggttggaaagactgttctatagctgccagagactggataagcgtgaccagtcaacaattccacgcaatctcctgaagacagatgctatcctttggcagtgggccatatgggaagctgcacaattcactgttctttctaagctgagaaccccactgggcagagctcaagacaccttccagacaattgaaggtatcattcgaagtctcgcaggtcacacattaaaccctgatcaggatgttagtcagtggacaactgcagacagtgatgaaggccatggtaacaaccaacttagacttgttcttcttctgcagtatctggaaaatctggagaaattaatgtataatgcatacgagggatgtgctaatgccttaacttcacctcccaaggtcattagaacttttttgtataccaatcgccaaacttgtcaggactggctaacgcggattcgactctccatcatgagggtaggattgttggcaggccagcctgcagtgacagtgagacatggctttgacttgcttacagagatgaaaacaaccagcctatctcaggggaatgaattggaagtaagcattatgatggtggtagaagcactatgtgaacttcattgtcctgaagctatacagggaattgctgtctggtcatcatctattgttggaaaacatcttctgtggattaactcagtggctcaacaggctgaagggaggtttgaaaaggcctctgtggagtaccaggaacacctgtgtgccatgacaggtgttgattgctgcatctccagctttgacaaatcggtgctcaccttagccagtgctgggtgtaagagtgccagcctgaaacattgtctgaatggtgaatccagaaaaagtgtgctgtccaaaccgactgactcttcccctgaggttataaattatttaggaaacaaagcatgtgagtgctacatctcaactgccgattgggctgctgtgcaggaatggcagaacgctatccatgacttgaaaaagagtaccagtagcacttccctcaacctgaaagctgacttcaactatataaaatcattaagcagctttgagtctggaaaatttgtcgaatgtaccgagcaattagaattgttaccaggagaaaatatcaatctacttgctggaggatcaaaagaaaaaatagacatgaaaaaactgcttcgtaacatgtgaagtccagatccaagggaacctcagaaatccattgaagttccattgttaagaagttctgtttgtttggcaactgctttaaa

SEQ ID NO: 236 - DNA, 4259 bp, Homo sapiens
  misc_feature: Incyte ID No: 1812221cB1
gagcaagaattcggcacgaggcgtttctctgttgtctcggtagaaggccagagtcacacacggtcctaagagctgggcaccaggaagcgaaggctgatctgaagaagacacttgaatcatgggtgacgttaaaaattttctgtatgcctggtgtggcaaaaggaagatgaccccatcctatgaaattagagcagtggggaacaaaaacaggcagaaattcatgtgtgaggttcaggtggaaggttataattacactggcatgggaaattccaccaataaaaaagatgcacaaagcaatgctgccagagactttgttaactatttggttcgaataaatgaaataaagagtgaagaagttccagcttttggggtagcatctccgcccccacttactgatactcctgacactacagcaaatgctgaaggagatttaccaacaaccatgggaggacctcttcctccacatctggctctcaaagcagaaaataattctgaggtaggggcctctggctatggtgttcctgggcccacctgggaccgaggagccaacttgaaggattactactcaaaaaaggaagaacaagaagtgcaagcgactctagaatcagaagaagtggatttaaatgctgggcttcatggaaactggaccttggaaaatgctaaagctcgtctaaaccaatattttcagaaagaaaagatccaaggagaatataagtacacccaagtgggtcctgatcacaacaggagctttattgcagaaatgaccatttatatcaagcagctgggcagaaggatttttgcacgagaacatggatcaaataagaaattggcagcacagtcctgtgccctgtcacttgtcagacaactgtaccatcttggagtggttgaagcttactccggacttacaaagaagaaggaaggagagacagtggagccttacaaagtaaacctctctcaagatttagagcatcagctgcaaaacatcattcaagagctaaatcttgagattttgcccccgcctgaagatccttctgtgccagttgcactcaacattggcaaattggctcagttcgaaccatctcagcgacaaaaccaagtgggtgtggttccttggtcacctccacaatccaactggaatccttggactagtagcaacattgatgaggggcctctggcttttgctactccagagcaaataagcatggacctcaagaatgaattgatgtaccagttggaacaggatcatgatttgcaagcaatcttgcaggagagagagttactgcctgtgaagaaatttgaaagtgagattctggaagcaatcagccaaaattcagttgtcattattagaggggctactggatgtgggaaaaccacacaggttccccagttcattctagatgactttatccagaatgaccgagcagcagagtgtaacatcgtagtaactcagcccagaagaatcagtgcggtttctgtggcagagcgagttgcatttgaaagaggagaagagcctggaaaaagctgtggctacagcgttcgatttgagtctatacttcctcttcctcatgccagtataatgttttgtactgtaggtgtgctcctgagaaaattagaagcaggcattcgaggaatcagtcatgtaattgtagatgaaatacatgaaagagatattaatactgacttccttttggtagtactgcgtgatgttgttcaggcttatcctgaagttcgcattgttcttatgtctgctactattgataccagcatgttttgtgaatatttcttcaattgccccatcattgaagtttatgggaggacttacccagttcaagaatattttctggaagactgcattcagatgacccactttgttcctccaccaaaagacaaaaagaagaaggataaggatgatgatggtggtgaggatgatgatgcaaattgcaacttgatctgtggtgatgaatatggtccagaaacaaggttgagcatgtctcaattgaacgaaaaggaaactccttttgaactcatcgaggctctacttaagtacattgaaacccttaatgttcctggagctgtgttggtttttttgcctggctggaatctgatttatactatgcagaagcatttggaaatgaatccacattttggaagccatcggtatcagattctacccctgcattctcagattcctcgagaggaacagcgcaaagtgtttgatccagtaccagttggagtaaccaaggttattttgtccacaaatattgctgaaacaagcattaccataaacgatgttgtttatgtcattgactcctgcaagcagaaagtgaaactcttcactgctcacaacaatatgaccaactatgctaccgtatgggcatcaaaaacaaaccttgagcaacggaaagggcgagctggccgagtacggcctggattctgctttcacctgtgcagccgagctcgttttgagagacttgaaacccacatgacaccagagatgttccgaacaccattgcatgaaattgctcttagcataaaacttctgcgtctaggaggaattggccaatttctggccaaagcaattgaacctccccctttggatgctgtgattgaagcagaacacactcttagagagcttgatgcattagatgccaatgatgagttgactcctttgggacgaatcctggctaaactccccattgagcctcgttttggcaaaatgatgataatggggtgtattttctacgtgggagatgctatctgtaccattgctgctgctacctgctttccagagcctttcatcaatgaaggaaagcggctgggctatatccatcgaaattttgctggaaacagattttctgatcacgtagcccttttatcagtattccaagcctgggatgatgctagaatgggtggagaagaagcagagatacgtttttgtgagcacaaaagacttaatatggctacactaagaatgacctgggaagccaaagttcagctcaaagagattttgattaattctgggtttccagaagattgtttgttgacacaagtgtttactaacactggaccagataataatttggatgttgttatctccctcctggcctttggtgtgtaccccaatgtatgctatcataaggaaaagaggaagattctcaccactgaagggcgtaatgcacttatccacaaatcatctgttaattgtccttttagtagccaagacatgaagtacccatctcccttctttgtatttggtgaaaagattcgaactcgagccatctctgctaaaggcatgactttagtcacccccctgcagttgcttctctttgcctccaagaaagtccaatctgatgggcagattgtgcttgtagatgactggattaaactgcaaatatctcatgaagctgctgcctgtatcactggtctccgggcagccatggaggctttggttgttgaagtaaccaaacaacctgctatcatcagccagttggaccccgtaaatgaacgtatgctgaacatgatccgtcagatctctagaccctcagctgctggtatcaaccttatgattggcagtacacggtatggagatggtccacgtcctcccaagatggcccgatacgacaatggaagcggatatagaaggggaggttctagttacagtggtggaggctatggcggtggctatagcagtggaggctatggtagcggaggctatggtggcagcgccaactcctttcgggcaggatatggtgcaggtgttggtggaggctatagaggagtttcccgaggtggctttagaggcaactctggaggagactacagagggcctagtggaggctacagaggatctgggggattccagcgaggaggtggtaggggggcctatggaactggctactttggacagggaagaggaggtggcggctattaaaacttggttatgtcagttcctgtgtgtagacagtaaggaaaaaaaggcatgctatgtgttacgtgttttttccagtatgtttatttgccaccaaaaagtaaatgcattttcacccattctgtggttcattgtagtttaaggaaaccaagcatatagatgcattagtgattttgtttatattatgtaaaatataacgatctcttaaaaataccacagtttgtattttttctttaaggagtaaagatttgcctttaaataacttggtattttcctggctttcgtttaatacaatagaaaataaagtattacaccgaaaaaaaaaaaaaaa

SEQ ID NO: 237 - DNA, 603 bp, Homo sapiens
  misc_feature: Incyte ID No: 1504168.4
gctcgaggcaagatgggtcaaagtcagagtggtggtcatggtcctggaggtggcaagaaggatgacaaggacaagaaaaagaaatatgaacctcctgtaccaactagagtggggaaaaagaagaagaaaacaaagggaccagatgctgccagcaaactgccactggtgacacctcacactcagtgccggttaaaattactgaagttagagagaattaaagactatcttctcatggaggaagaattcattagaaatcaggaacaaatgaaaccattagaagaaaagcaagaggaggaaagatcaaaagtggatgatctgagggggaccccgatgtcagtaggaaccttggaagagatcattgatgacaatcatgccatcgtgtctacatctgtgggctcagaacactacgtcagcattctttcatttgtagacaaggatctgctggaacctggctgctcggtcctgctcaaccacaaggaatctgtggagcttcctctcacccatcctgaatattatgaagagatgggtataaagcctcctaagggggtcattctctatgcgtccacctggcacaggtaaaaaccttgttagcccaaaagcagt

SEQ ID NO: 238 - DNA, 889 bp, Homo sapiens
  misc_feature: Incyte ID No: 109925.11
ctcagcccagcatcattgcaaatcaataaaaactgcacactctcatttagaagatttattcttccatttggtaagttataggcatttgttagtgtctctgtgacgtcgttagtggaaattgccttctgctgttttccttctgctttttctgcagcatccatttttttttaatgaatggcatcattcaatgaaattgattgaattgattgagatttagggttttgctttctcgtgatgagttttgggcccatttttcttatgcagaaataaaaccactggctcctgaaagttgtaggaactgtgtccacgtgagtgctcagggacctgggaatgactttcttttgtctctgtctcccacagttcagcgtactcttttagagaaatagaagattgtcggcagaaacagcccaggcgttggcagcagggttagaacagctgcctgaggctcctccctgaaggacacctgcctgagagcagagatggaggccttctgttcacggcggattctttgttttaatcttgcgatgtgctttgcttgttgctgggcggatgatgtttactaacgatgaattttacatccaaagggggataggcacttggacccccattctccaaggcccgggggggcggtttcccatgggatgtgaaaggctggccattattaagtccctgtaactcaaatgtcaaccccaccgaggcacccccccgtcccccagaatcttggctgtttacaaatcacgtgtccatcgagcacgtctgaaacccctggtagtcccgacttctttttaattaaaataaggtaagcccttcaatttgtttcttcaatatttctttcatttgtagggatatttgtttttcatatcagactaataaaaagaaattagaaacc

SEQ ID NO: 239 - DNA, 5990 bp, Homo sapiens
  misc_feature: Incyte ID No: 1073168.8
tctttgtattctgtcccctttgtagtctaccccacaagctttgccatgtagtaagtcctccaaaaacaaacattaaattaaactaaatgctctgctattgggtggcattgggtacctttgctgctctgataagaaagtgcaagataggatctttgaattaaaatatgtgttcatcttcaacatgaatattatgctctattccaggttcatcactcattaaaccattgttagatgacttccttttccgagcttctagaattattttaaatagtcattctccagctggcagtgccgccatcagtcaacaggactttcatccaaagtgtagtacagcgaatagccgattggcagcctatgaagtccttgtgatgttggctgatagttcaccttcaaatcttcaaattattataaaagaactgctttctatgcatcaccagcctgaccctgctcttaccaaggagtttgattaccttcccccagtggatagcaggtccagttcagggtttgtggggctgagaaatggtggtgcaacttgttatatgaatgcagtcttccagcagctgtatatgcaacctgggctccctgagtcattactttcagtggatgatgacacagacaatccagatgatagcgtgttttaccaagtgcagtctctctttggacatttaatggaaagcaagctgcagtactatgtacctgagaatttttggaagattttcaagatgtggaataaagaactttatgtgagagaacagcaggatgcatatgaattctttactagtctcattgatcagatggatgaatacctcaagaaaatggggagagaccaaatttttaagaatacatttcagggcatctactctgatcagaagatctgtaaagactgtcctcacagatatgagcgtgaagaagctttcatggctctcaatctaggagtgacttcttgtcagagtttggaaatttctttggaccaatttgttagaggagaagttctagaaggaagtaatgcgtactactgtgaaaagtgtaaagaaaagagaataacagtgaaaaggacctgtattaaatctttacctagcgtcttggtaattcacctaatgagatttgggtttgactgggaaagcggacgctccattaaatatgatgaacaaataaggtttccctggatgctaaacatggagccttacacagtttcaggaatggctcgccaagattcttcttctgaagttggggaaaatgggcgaagtgtggatcagggcggtggaggatccccacgaaaaaaggttgccctcacagaaaactatgaacttgtcggtgtcatcgtacacagtgggcaggcacacgcaggccactactattccttcattaaggacaggcgagggtgtggaaaaggaaagtggtataaatttaatgacacagttatagaagaatttgacctaaatgacgagaccctggagtatgaatgctttggaggagaatatagaccaaaagtttatgatcaaacaaacccatacactgatgtgcgccgaagatactggaatgcctatatgcttttctaccaaagggtgtctgatcagaactccccagtattaccaaagaaaagtcgagtcagcgttgtacggcaggaagctgaggatctctctctgtcagctccatcttcaccagaaatttcacctcagtcatcccctcggccccataggccgaacaatgaccggctgtctattcttaccaagctggttaaaaaaggcgagaagaaaggactgtttgtggagaaaatgcctgctcgaatataccagatggtgagagatgagaacctcaagtttatgaagaatagagatgtatacagtagtgattatttcagttttgttttgtctttagcttcattgaatgctactaaattaaagcatccatattatccttgcatggcaaaggtgagcttacagcttgctattcaattcctttttcaaacttatctacggacaaagaagaaactcagggttgatactgaagaatggattgctaccattgaagcattgctttcaaaaagttttgatgcttgtcagtggttagttgaatattttattagttctgaaggacgagaattgataaagattttcttactggagtgcaatgtgagagaagtacgagttgctgtggccaccattctggagaaaaccctagacagtgccttgttttatcaggataagttaaaaagccttcatcagttactggaggtactacttgctctgttggacaaagacgtcccagaaaattgtaaaaactgtgctcagtactttttcctgttcaacacttttgtacaaaagcaaggaattagggctggagatcttcttctgaggcattcagctctgcggcacatgatcagcttcctcctaggggccagtcggcaaaacaatcagatacgtcgatggagttcagcacaagcacgagaatttgggaatcttcacaatacagtggcgttacttgttttgcattcagatgtctcatcccaaaggaatgttgctcctggcatatttaagcaacgaccacccattagcattgctccctcaagccctctgttgcccctccatgaggaggtagaagccttgttgttcatgtctgaagggaaaccttacctgttagaggtaatgtttgctttgcgggagctgacaggctcgctcttggcactcattgagatggtagtgtactgctgtttctgtaatgagcatttttccttcacaatgctgcatttcattaagaaccaactagaaacggctccacctcatgagttaaagaatacgttccaactacttcatgaaatattggttattgaagatcctatacaagcagagcgagtcaaatttgtgtttgagacagaaaatggattactagctttgatgcaccacagtaatcatgtggacagtagtcgctgctaccagtgtgtcaaatttcttgtcactcttgctcaaaagtgtcctgcagctaaggagtacttcaaggagaattcccaccactggagctgggctgtgcagtggctacagaagaagatgtcagaacattactggacaccacagagtaatgtctctaatgaaacatcaactggaaaaacctttcagcgaaccatttcagctcaggacacgttagcgtatgccacagctttgttgaatgaaaaagagcaatcaggaagcagtaatgggtcggagagtagtcctgccaatgagaacggagacaggcatctacagcagggttcagaatctcccatgatgattggtgagttgagaagtgaccttgatgatgttgatccctagaggaacatgcccagcctgagaggagtcaagacacaatactggatgctcagcaccttcttggaatcagaatctcgaaccctttggaagagcctggagattggactgggaaagctgctgtgacttgggcggatcgtgtatttctcaaggaaagcatttttaagccactagaaggtttgggagctgtttggcagtgggagaactccggcatgtggatcagctgtcccgggagcgtggtctatatgtggattcacatttctgtggagattttcggaaatagagccagtggcagacttttttgttacacgaacatacaagagtgagcataaagctgttgctttctctacgatgctacaaaagaaattcctttggtttttatattttaagaaaaagcaagctgcttttagatatgtgggggcaaatttttaatcttgcagtaatattaaacaggaatatccaatttaaaatgatgtaaagatgtaataaaattccttttcattgtaaaatagtaattaagtcaatttacacagacctttgtatttaatatgtctccctatttgtatagaatttcagatgggtctagatgagaaccctatgcataagcttggatcttgatgaaaggttaccaggatcaggatcaaaaattgggaaatactaagctcttgaagatatttttctgatataattagattgaaaagagcaattttgaaaatgctgtgttctccagaagtacagggtgcattatttgacatcaattacttaaagaagttatgagttgttccccaaacagattttaaaaacagcaaaataaaagcactttaagatataattttactgagtttaacttcacagaattatctttttaatgcttggagacatattgaataaactgtagtcttaaatcatgtgatctgcaatcgtttgcttttgcttaaaacataattactgaaacccttggtattggttgtatatgaagttaactatttgagttggtacacactgcttgtgagtttcatagttattgtaatgcagagaaggaatttgagaatttgtttctcctcaacatgactaattaacactgaaaagtcagtcaaggtttaagatttattttcccagaaataaatataaagcaattgaataaccatccatttagtcgtatttccaaagtatagcaccattcactcatttataccagctcccttttatggtgtgggggagaggtttacacccacatatttcatatatattttgtacattttgtattttgaattgctcacattttcggccctgttttgcctttagttacaggtcctgccttattttcatctcaccatgcacagaactagggagccttaggaagtgccaggttttcactgtcagatttgccaagtcacagaggcgcagccagccctgaagtgcctgtctggctgctgtggcattgtgtgggcatgtggccaggcagatggcatctcattactgtgctctcgccatggcccagtcttttcattctctggcagtgagggtttctgtgctgtcagacttcattgttattctgtgacttgctggaggttggcagtggcctttgtcaaacacactgagaagatggaagggccagcacttaagagcagaactgtacccttagagaaacggacagaggcgagtggcaaacttcagacggttccaatggtcttgcagtttgaaatgtgatgttctaccattggttttgagtacgtgaatacttcctgtcctactgtttcccctaccctattctcaccttctctccgcccacatcctcaccaagagattgtgtgggacatgaccttgaaatgctggcgatgatccacactgggatatcatcgctggcgactgcactctcaggagcccaaaatcaggagtgaaattgccacttctagtccccttatttcctatggaaacaacgccttccgcacccctagcacctgccgtcctcactgtaaaggttcatcaggatcgtccaccgtgtatattatacgcttcagatcatgttgcttatattgttgctgcaatgaccatcgttttcactttgctggtaaccacttgattgctgacagctacagtcaatgaacctgctgatgactttttttaatgtagtacaacagtgacagttatgacaggcttaccttggaagagttgtcatttttactgccaattttttggatgaagatgtttttataaacctttcaaaatggtctgcaaacagagcaggaattgcacaattaactcaataatgctgtgtgttctcaagaagctcccttagtgaggccgatcttaagatggccgattctgcccgttgaaggcatcctgggaaagaaaacaagcatcccagcgggcatctcaccacgacttctcctggagtcctcacacggtcactgacaactacagtcagttttaggaactagagtgccgtatcatcagacttaccctgtcctgccccaccttccctgctaacatcgaggtgtgtgcagttaccttctgagcttggaacaagcagactggaattttcctctgctacctcttgtgtataaaatcttgtttataaaatttcaaaaggaagtagatacactagggaagaaccttaattctaaatttggttcatgtgtggcaaagttcttagcttctaagagtataaaataaatttttcaaaaacag

SEQ ID NO: 240 - DNA, 2336 bp, Homo sapiens
  misc_feature: Incyte ID No: 2239072cB1
cagcattgagagaagctgctgctgctaatgctgctgctgctgctgccgccgccgccgctgctgctgctgctgttggtctgatgctgcagtaggtttctgtgcagcattgcagaatccacacctagagaacagaagacacagacacgtacgtctactacccttgttagaaggaagctttggatcttcggtggataacaagagtaatccacagacttaaaacatgagctcagatgccagccaaggcgtgattaccactcctcctcctcccagcatgcctcacaaagagagatattttgaccgcatcaatgaaaatgacccagaatacattagggagaggaacatgtctcctgatctacgacaagacttcaacatgatggagcagaggaaacgagttactcagatcctgcaaagtcctgcctttcgggaagacttggaatgccttattcaagaacagatgaagaaaggccacaacccaactggattactagcattacagcagattgcagattacatcatggccaattctttctcgggtttttcttcacctcctctcagtcttggcatggtcacacctatcaatgaccttcctggtgcagatacatcctcatatgtgaagggagaaaaacttactcgctgtaaacttgccagcctgtacagacttgtagacttgtttggatgggcacacctggcaaatacctatatctcagtaagaataagtaaggagcaagaccacattataataattcccagaggcctatctttttctgaagctacagcctccaatttggtgaaagtcaatataataggagaagtggttgaccagggaagtaccaatttgaaaattgaccatacaggattcagtccccatgctgcaatctattcaacacgtcctgatgttaagtgtgtgatacacatccatacccttgcaacagcagctgtatcctccatgaaatgtgggatccttccaatttctcaagagtctcttcttctgggagatgttgcctattatgactaccaagggtcacttgaagaacaggaggagagaattcaactgcagaaggttctgggaccaagttgtaaggtgctggtactcaggaatcatggtgtggttgcacttggagaaacattagaggaggcttttcattatatttttaatgtgcaactagcctgtgagattcaggtgcaggccctagcaggtgcaggtggagtagacaatctccatgtactggactttcagaagtataaagctttcacttacactgtagcagcgtctggtggaggaggtgtgaatatgggttcccatcaaaaatggaaggttggcgaaattgagtttgaagggcttatgaggactctggacaacttggggtatagaacaggctatgcttacaggcatcctctcattcgagagaagcctaggcacaagagtgatgtggaaatcccagcaactgtgactgctttttcctttgaagacgatacagtgccactctctcctctcaaatacatggcacagaggcaacagcgtgaaaaaacaagatggctgaactcaccaaatacttacatgaaagtgaatgtgcctgaggagtctcggaacggagaaaccagtccccgaaccaaaatcacgtggatgaaagcagaagactcatctaaagttagtggtggaacacctatcaaaattgaagatccaaatcagtttgttcctttaaacacaaacccgaatgaggtactagaaaagagaaataagattcgggaacaaaatcgatatgacttgaaaacagcaggaccacaatctcagttgcttgctggaattgttgtggataagccaccttctactatgcaatttgaagatgatgatcatggcccaccagctcctcctaacccatttagtcatctcacagaaggagaacttgaagagtataagaggacaatcgaacgtaaacaacaaggcctagaagaaaaccatgagctgttttccaagagcttcatctccatggaagtgcctgtcatggtagtaaatggcaaggatgatatgcatgatgttgaagatgagcttgctaagcgagtgagtaggttaagcacaagtacaaccatagaaaacatcgagattactattaagtctccagagaaaatcgaagaagtcctgtcacctgaaggctccccttcaaaatcgccatccaagaaaaagaagaaattccgcactccttcttttctgaaaaagaacaaaaaaaaggagaaagttgaggcctaaataaagtctttttataattattattataacaatgtgacattgcacatctaaataccacatttaagttgatcattaatatgcaatggtagat

SEQ ID NO: 241 - DNA, 1836 bp, Homo sapiens
  misc_feature: Incyte ID No: 4767318cB1
ttttagaaggttagtgttggttcttttattcgattaaacaggaatacacatatgtctaccaaagaataggtaagggagaaataagaacactaaaaaaactcggaatcgttaagtgtgaagcatatttggagttaaaagaaccaaatattactaagtaagcagacgcgggcacgcgctgcataccgggatttgtagtcccttccggggcggggtacagcgcgcctgcgcagaggggccgtcgctcttccgggcgcatgcgtgcggcagcggcgccaggactgactgcgccgtggaggctgctgcagtgttgtgagttggaagctggggagctcggcatggcggtccccgctgcagccatggggccctcggcgttgggccagagcggccccggctcgatggccccgtggtgctcagtgagcagcggcccgtcgcgctacgtgcttgggatgcaggagctgttccggggccacagcaagacgcgcgagttcctggcgcacagcgccaaggtgcactcggtggcctggagttgcgacgggcgtcgcctagcctcggggtccttcgacaagacggccagcgtcttcttgctggagaaggaccggttggtcaaagaaaacaattatcggggacatggggatagtgtggaccagctttgttggcatccaagtaatcctgacctatttgttacggcgtctggagataaaaccattcgcatctgggatgtgaggactacaaaatgcattgccactgtgaacactaaaggggagaacattaatatctgctggagtcctgatgggcagaccattgctgtaggcaacaaggatgatgtggtgacctttattgatgccaagacacaccgttccaaagcagaagagcagttcaagttcgaggtcaacgaaatctcctggaacaatgacaataatatgttcttcctgacaaatggcaatggttgtatcaacatcctcagctacccagaactgaagcctgtgcagtccatcaacgcccatccttccaactgcatctgtatcaagtttgaccccatggggaagtactttgccacaggaagtgcggatgctttggtcagcctctgggatgtggatgagttagtgtgtgttcggtgcttttccaggctggattggcctgtaagaaccctcagtttcagccatgatgggaaaatgctggcgtcagcatcggaagatcattttattgacattgctgaagtggagacaggggacaaactatgggaggtacagtgtgagtctccgaccttcacagtggcgtggcaccccaaaaggcctctgctggcatttgcctgtgatgacaaagacggcaaatatgacagcagccgggaagccggaactgtgaagctgtttgggcttcctaatgattcttgagaggaggttgtagggagaggaggccccggcagaggtcttccttcatgtggttagtttggtctgttctctcggagttggtgggcaccctaaatatttgtaagttggtataaattgtaaacgtctctggtcaggctgcgcatttcgttcttttgctttgtctgtgtattagctctttccattctttgcccccagcatgagttaactcgcgtggactctgcagtgcgagtagtgaccccagcataccttgtcctctggacctcctgtcttctctgcttctgggtgcatggtagactttgtggcatttgatacaacttggacaatacctagtttggagggaggggaatggaagggcatggaagtttttttaaataattaaaaatatatacatataattttgagaattgagcatttaataaactgacttttgttattatggaaaaaaaaa

SEQ ID NO: 242 - DNA, 3459 bp, Homo sapiens
  misc_feature: Incyte ID No: 1339068cB1
caaccctcactaaagggaataagcttgcggccgctgcaggtccccgctcccctccccgtgcgtccgcccatggccgccgccgggcagctgtgcttgctctacctgtcggcggggctcctgtcccggctcggcgcagccttcaacttggacactcgggaggacaacgtgatccggaaatatggagaccccgggagcctcttcggcttctcgctggccatgcactggcaactgcagcccgaggacaagcggctgttgctcgtgggggccccgcgggcagaagcgcttccactgcagagagccaacagaacgggagggctgtacagctgcgacatcaccgcccgggggccatgcacgcggatcgagtttgataacgatgctgaccccacgtcagaaagcaaggaagatcagtggatgggggtcaccgtccagagccaaggtccagggggcaaggtcgtgacatgtgctcaccgatatgaaaaaaggcagcatgttaatacgaagcaggaatcccgagacatctttgggcggtgttatgtcctgagtcagaatctcaggattgaagacgatatggatgggggagattggagcttttgtgatgggcgattgagaggccatgagaaatttggctcttgccagcaaggtgtagcagctacttttactaaagactttcattacattgtatttggagccccgggtacttataactggaaagggattgttcgtgtagagcaaaagaataacactttttttgacatgaacatctttgaagatgggccttatgaagttggtggagagactgagcatgatgaaagtctcgttcctgttcctgctaacagttacttaggtttttctttggactcagggaaaggtattgtttctaaagatgagatcacttttgtatctggtgctcccagagccaatcacagtggagccgtggttttgctgaagagagacatgaagtctgcacatctcctccctgagcacatattcgatggagaaggtctggcctcttcatttggctatgatgtggcggtggtggacctcaacaaggatgggtggcaagatatagttattggagccccacagtattttgatagagatggagaagttggaggtgcagtgtatgtctacatgaaccagcaaggcagatggaataatgtgaagccaattcgtcttaatggaaccaaagattctatgtttggcattgcagtaaaaaatattggagatattaatcaagatggctacccagatattgcagttggagctccgtatgatgacttgggaaaggtttttatctatcatggatctgcaaatggaataaataccaaaccaacacaggttctcaagggtatatcaccttattttggatattcaattgctggaaacatggaccttgatcgaaattcctaccctgatgttgctgttggttccctctcagattcagtaactattttcagatcccggcctgtgattaatattcagaaaaccatcacagtaactcctaacagaattgacctccgccagaaaacagcgtgtggggcgcctagtgggatatgcctccaggttaaatcctgttttgaatatactgctaaccccgctggttataatccttcaatatcaattgtgggcacacttgaagctgaaaaagaaagaagaaaatctgggctatcctcaagagttcagtttcgaaaccaaggttctgagcccaaatatactcaagaactaactctgaagaggcagaaacagaaagtgtgcatggaggaaaccctgtggctacaggataatatcagagataaactgcgtcccattcccataactgcctcagtggagatccaagagccaagctctcgtaggcgagtgaattcacttccagaagttcttccaattctgaattcagatgaacccaagacagctcatattgatgttcacttcttaaaagagggatgtggagacgacaatgtatgtaacagcaaccttaaactagaatataaattttgcacccgagaaggaaatcaagacaaattttcttatttaccaattcaaaaaggtgtaccagaactagttctaaaagatcagaaggatattgctttagaaataacagtgacaaacagcccttccaacccaaggaatcccacaaaagatggcgatgacgcccatgaggctaaactgattgcaacgtttccagacactttaacctattctgcatatagagaactgagggctttccctgagaaacagttgagttgtgttgccaaccagaatggctcgcaagctgactgtgagctcggaaatccttttaaaagaaattcaaatgtcactttttatttggttttaagtacaactgaagtcacctttgacaccccagatctggatattaatctgaagttagaaacaacaagcaatcaagataatttggctccaattacagctaaagcaaaagtggttattgaactgcttttatcggtctcgggagttgctaaaccttcccaggtgtattttggaggtacagttgttggcgagcaagctatgaaatctgaagatgaagtgggaagtttaatagagtatgaattcagggtaataaacttaggtaaacctcttacaaacctcggcacagcaaccttgaacattcagtggccaaaagaaattagcaatgggaaatggttgctttatttggtgaaagtagaatccaaaggattggaaaaggtaacttgtgagccacaaaaggagataaactccctgaacctaacggagtctcacaactcaagaaagaaacgggaaattactgaaaaacagatagatgataacagaaaattttctttatttgctgaaagaaaataccagactcttaactgtagcgtgaacgtgaactgtgtgaacatcagatgcccgctgcgggggctggacagcaaggcgtctcttattttgcgctcgaggttatggaacagcacatttctagaggaatattccaaactgaactacttggacattctcatgcgagccttcattgatgtgactgctgctgccgaaaatatcaggctgccaaatgcaggcactcaggttcgagtgactgtgtttccctcaaagactgtagctcagtattcgggagtaccttggtggatcatcctagtggctattctcgctgggatcttgatgcttgctttattagtgtttatactatggaagtgtggtttcttcaagagaaataagaaagatcattatgatgccacatatcacaaggctgagatccatgctcagccatctgataaagagaggcttacttctgatgcatagtattgatctacttctgtaattgtgtggattctttaaacgctctaggtacgatgacagtgttccccgataccatgctgtaaggatccggaaagaagagcgagagatcaaagatgaaaagtatattgataaccttgaaaaaaaacagtggatcacaaagtggaacagaaa

SEQ ID NO: 243 - DNA, 1775 bp, Homo sapiens
  misc_feature: Incyte ID No: 2966620cB1
gtgagtcatgcaggtttgcagccagccccaaagggggtgtgtgcgcgagcagagcgctataaatacggcgcctcccagtgcccacaacgcggcgtcgccaggaggagcgcgcgggcacagggtgccgctgaccgaggcgtgcaaagactccagaattggaggcatgatgaagactctgctgctgtttgtggggctgctgctgacctgggagagtgggcaggtcctgggggaccagacggtctcagacaatgagctccaggaaatgtccaatcagggaagtaagtacgtcaataaggaaattcaaaatgctgtcaacggggtgaaacagataaagactctcatagaaaaaacaaacgaagagcgcaagacactgctcagcaacctagaagaagccaagaagaagaaagaggatgccctaaatgagaccagggaatcagagacaaagctgaaggagctcccaggagtgtgcaatgagaccatgatggccctctgggaagagtgtaagccctgcctgaaacagacctgcatgaagttctacgcacgcgtctgcagaagtggctcaggcctggttggccgccagcttgaggagttcctgaaccagagctcgcccttctacttctggatgaatggtgaccgcatcgactccctgctggagaacgaccggcagcagacgcacatgctggatgtcatgcaggaccacttcagccgcgcgtccagcatcatagacgagctcttccaggacaggttcttcacccgggagccccaggatacctaccactacctgcccttcagcctgccccaccggaggcctcacttcttctttcccaagtcccgcatcgtccgcagcttgatgcccttctctccgtacgagcccctgaacttccacgccatgttccagcccttccttgagatgatacacgaggctcagcaggccatggacatccacttccacagcccggccttccagcacccgccaacagaattcatacgagaaggcgacgatgaccggactgtgtgccgggagatccgccacaactccacgggctgcctgcggatgaaggaccagtgtgacaagtgccgggagatcttgtctgtggactgttccaccaacaacccctcccaggctaagctgcggcgggagctcgacgaatccctccaggtcgctgagaggttgaccaggaaatacaacgagctgctaaagtcctaccagtggaagatgctcaacacctcctccttgctggagcagctgaacgagcagtttaactgggtgtcccggctggcaaacctcacgcaaggcgaagaccagtactatctgcgggtcaccacggtggcttcccacacttctgactcggacgttccttccggtgtcactgaggtggtcgtgaagctctttgactctgatcccatcactgtgacggtccctgtagaagtctccaggaagaaccctaaatttatggagaccgtggcggagaaagcgctgcaggaataccgcaaaaagcaccgggaggagtgagatgtggatgttgcttttgcacctacgggggcatctgagtccagctccccccaagatgagctgcagccccccagagagagctctgcacgtcaccaagtaaccaggccccagcctccaggcccccaactccgcccagcctctccccgctctggatcctgcactctaacactcgactctgctgctcatgggaagaacagaattgctcctgcatgcaactaattcaataaaactgtcttgtgagctgatcgcttggagggtctta

SEQ ID NO: 244 - DNA, 3498 bp, Homo sapiens
  misc_feature: Incyte ID No: 1347119.1
tggcagtcctacccagtagacacaggcaccgtttatcgcgaagagggtggaggtggtggaagaggacgggccttctgagaagagccaggacccacctgctctggcaagatccactcctggctcaaacaggtcttccccaggcaacaaagacaaggaggccccctgctccagagagctccagagggacttggctggtgaggaggctttcagggcccccaacacagatgctgcaaggtcaagtgcacagttgagtgatggcaatgtgggatccggagccacgggctcccggcctgaaggcttggctgcagtagacatcggctccgagagaggaagctccagtgccacttcagtctctgctgtccctgctgataggaagagcaacagcacagcagcccaggaggatgcaaaggcagacccaaagggggccttggctgattatgaggggaaggatgtggccaccagggtcggagaggcctggcaggagaggcctggagctccaagaggtggccaaggagacccagctgtacccgctcagcaacctgcagatcccagcaccccagagcggcagagcagccccagcggatctgagcaacttgtcagacgagagagttgtggcagcagcgtgttgactgattttgaggggaaggatgtggccaccaaggtcggagaggcctggcaggacaggcctggagccccaagaggtggccaaggagacccagctgtacccactcagcaacctgcagatcccagtaccccagaacagcagaacagccccagcggatctgagcaattcgtcagacgagagagctgcaccagcagggtgaggagcccctcgagctgcatggtcactgttactgtcactgccacatctgagcagcctcacatttatattccagcccccgcaagtgaattggactccagctctaccaccaaagggattctcttcgtgaaggagtacgtgaatgctagtgaagtgtcttctgggaagccagtatctgcacgctatagcaacgtcagcagcattgaggactcattcgccatggagaagaagcctccatgtggcagcactccatactctgagaggacaactggagggatctgtacttactgcaaccgtgagatccgagactgtccaaagattaccctagaacatcttggtatctgctgccatgaatattgctttaagtgtgggatttgcagtaaaccgatgggcgatctcctggatcagatcttcattcaccgtgacaccattcactgtgggaaatgctatgagaagctcttctagcgaccccccaccgccaggctgatcagaagctgatgactcgtggacaaatttggctgtccccagttttgccccaagttgctgtctccccttccctcacctcctccctccctgtttgatttcttcatgcttttgcccttctcaagttgaagttgcatacatccaatatcgtatcttaatgatgctatgataattgcttgtgtgtgtagcttcttgtagcttagaaagcgctttatgcccatgatgtcatttcaggctcaaccaaagaggatcaaacaggaattccatcttggcttccctaagacagattggctttctaatgagtttaagtgggcagaagtgtagggttcagtgtgtcctgactcccttgaggcttataatgggccaagttgaagactgttgatgatccctggtgggtaaattgcagacatcaaatgctagggattggcataggctagtgtttagcttgtctatttgccatatctattttttttaaatttccatacacttgtaaaagtagttagttgcttttgattgagttatatagcagtttttcatttggtcttccactcacctttcactatatttgagtgttcccttacaggtatgttggcatgtgttggaaaatttacacaattaggtttaaattcagtaggatgtgattttaggatgctactgatcaaagtgatatctgtgtctgttggaatcttgatagctgattaatttgccctcaattctgctccctgaacttcacacataaatcttcccaagtgggttttagggtgtatagatcccagcaggattaaggaggtggaaaagcagctaacatttcttgaggctctaccacatagcaggcactgtcacagagtaatggcattaatccccataataatcctgtgaaggtgatattctcatcccatcttagacatgaggatattggaactcagagaggtggctattgcattgcgcagaacgctacagagcccatgctcttcccagagcagcacccacaaaagcaagcattgattttgtgctcagtgtgtgccaagcactgtgcagagggtacacagttcctgccaggttaacaccctcccttcaggcctcccaaaggcataggcttgcaaagagcagaaggtgtgaaatcacactcttcctctgggcatcctggatccctgaattatccccccccccatgaagtacttcaagggccaagctgcccctttccctcctctccgcccatgaaaatgcctccaaactgagatgctttcagctgagaacagatttgactcacagacattaccaaagaggagcttgtgaatccaggaaaagctccagggggctagctgatctgagcagagagctttcagtgacccattttcctgtctagactctgccttaagctagtggcaactgctggggccccaggtacttgggacatggaaactcgttggatggctgggcagatgtaagcctgtccatgcagtcagccgatcctctgctcaggttcagctggactctgccatctgtgggcccagcatcactctgtaagttccttgaaaggaagaacaaccttagagtatttctgatacaaaatgagggcctctgctcttgatttaattataaaatgtctacgtctttctccagtttctgagccctatgcacattggcttgtgggcttgttcttcctgccaaatgatcagagaggaacattccatttatttgtagtggatttcctctggagggcatgtacccacactaaataccaactgctcttcctcagctgtagtccccaacatcagacttggcacgtggtggacactaacacacaggcactcaatgaatgagtgaaggaaataaaagtcaccccgttggtgagaggtgctatccctgagtctcagtgcaggaccagtggatgaaaggcaaggtaaagaggcccaagataggctggcttcccccgttcaaggtatagtctgcctttaagggagttttagaaccaacatgcaagacattgaaagaaatcttgcaagagccattattgacttagatccaaaacagcctctctcatgtctaaaaaggcacagaattttgcagatctgaggaagagggatgcattacctttttgcttcttttcaattgcttagtgtttctaatcatacttaatccacactaatgtgcgcaattataataaatggtaagatatcacatgtgtcagtgtt

SEQ ID NO: 245 - DNA, 5238 bp, Homo sapiens
  misc_feature: Incyte ID No: 816792cB1
ctttgctgatttcaggagctactctcctcctggtgaggtggaaattccagcaagaatagaggtgaagacaagccaccaggactcaggagggaaacgctgaccattagaaacctctgcataagacgttgtaaggaggaaaataaaagagagaaaaacacaaagatttaaacaagaaacctacgaacccagctctggaaagagccaccttctccaaaatggatatgtttcctctcacctgggttttcttagccctctacttttcaagacaccaagtgagaggccaaccagacccaccgtgcggaggtcgtttgaattccaaagatgctggctatatcacctctcccggttacccccaggactacccctcccaccagaactgcgagtggattgtttacgcccccgaacccaaccagaagattgtcctcaacttcaaccctcactttgaaatcgagaagcacgactgcaagtatgactttatcgagattcgggatggggacagtgaatccgcagacctcctgggcaaacactgtgggaacatcgccccgcccaccatcatctcctcgggctccatgctctacatcaagttcacctccgactacgcccggcagggggcaggcttctctctgcgctacgagatcttcaagacaggctctgaagattgctcaaaaaacttcacaagccccaacgggaccatcgaatctcctgggtttcctgagaagtatccacacaacttggactgcacctttaccatcctggccaaacccaagatggagatcatcctgcagttcctgatctttgacctggagcatgaccctttgcaggtgggagagggggactgcaagtacgattggctggacatctgggatggcattccacatgttggccccctgattggcaagtactgtgggaccaaaacaccctctgaacttcgttcatcgacggggatcctctccctgacctttcacacggacatggcggtggccaaggatggcttctctgcgcgttactacctggtccaccaagagccactagagaactttcagtgcaatgttcctctgggcatggagtctggccggattgctaatgaacagatcagtgcctcatctacctactctgatgggaggtggacccctcaacaaagccggctccatggtgatgacaatggctggacccccaacttggattccaacaaggagtatctccaggtggacctgcgctttttaaccatgctcacggccatcgcaacacagggagcgatttccagggaaacacagaatggctactatgtcaaatcctacaagctggaagtcagcactaatggagaagactggatggtgtaccggcatggcaaaaaccacaaggtatttcaagccaacaacgatgcaactgaggtggttctgaacaagctccacgctccactgctgacaaggtttgttagaatccgccctcagacctggcactcaggtatcgccctccggctggagctcttcggctgccgggtcacagatgctccctgctccaacatgctggggatgctctcaggcctcattgcagactcccagatctccgcctcttccacccaggaatacctctggagccccagtgcagcccgcctggtcagcagccgctcgggctggttccctcgaatccctcaggcccagcccggtgaggagtggcttcaggtagatctgggaacacccaagacagtgaaaggtgtcatcatccagggagcccgcggaggagacagtatcactgctgtggaagccagagcatttgtgcgcaagttcaaagtctcctacagcctaaacggcaaggactgggaatacattcaggaccccaggacccagcagccaaagctgttcgaagggaacatgcactatgacacccctgacatccgaaggtttgaccccattccggcacagtatgtgcgggtatacccggagaggtggtcgccggcggggattgggatgcggctggaggtgctgggctgtgactggacagactccaagcccacggtagagacgctgggacccactgtgaagagcgaagagacaaccaccccctaccccaccgaagaggaggccacagagtgtggggagaactgcagctttgaggatgacaaagatttgcagctcccttcgggattcaattgcaacttcgatttcctcgaggagccctgtggttggatgtatgaccatgccaagtggctccggaccacctgggccagcagctccagcccaaacgaccggacgtttccagatgacaggaatttcttgcggctgcagagtgacagccagagagagggccagtatgcccggctcatcagcccccctgtccacctgccccgaagcccggtgtgcatggagttccagtaccaggccacgggcggccgcggggtggcgctgcaggtggtgcgggaagccagccaggagagcaagttgctgtgggtcatccgtgaggaccagggcggcgagtggaagcacgggcggatcatcctgcccagctacgacatggagtaccagattgtgttcgagggagtgatagggaaaggacgttccggagagattgccattgatgacattcggataagcactgatgtcccactggagaactgcatggaacccatctcggcttttgcagtggacatcccagaaatacatgagagagaaggatatgaagatgaaattgatgatgaatacgaggtggactggagcaattcttcttctgcaacctcagggtctggcgccccctcgaccgacaaagaaaagagctggctgtacaccctggatcccatcctcatcaccatcatcgccatgagctcactgggcgtcctcctgggggccacctgtgcaggcctcctgctctactgcacctgttcctactcgggcctgagctcccgaagctgcaccacactggagaactacaacttcgagctctacgatggccttaagcacaaggtcaagatgaaccaccaaaagtgctgctccgaggcatgacggattgcacctgaatcctatctgacgtttcattccagcaagaggggctggggaagattacatttttttttcctttggaaactgaatgccataatctcgatcaaaccgatccagaataccgaaggtatggacaggacagaaaagcgagtcgcaggaggaagggagatgcagccgcacaggggatgattaccctcctaggaccgcggtggctaagtcattgcaggaacggggctgtgttctctgctgggacaaaacaggagctcatctctttggggtcacagttctattttgtttgtgagtttgtattattattattattattattattattattatattttatttctttggtctgtgagcaactcaaagaggcagaagaggagaatgacttttccagaatagaagtggagcagtgatcattattctccgctttctctttctaatcaacacttgaaaagcaaagtgtcttttcagcctttccatctttacaaataaaactcaaaaaagccgtccagcttatcccatcctctgattgtcttctgacttaagggatttactgtggtgtaggttctgccagccaaccctacaagctgccatttccagtcctagcatttaagtaggatgttgttgcctttaacttttcttatccaggggaaaattgccattttagggtcagcatgaacagctctttcttgtatgcgatttaaaacaaactggaaaggaaacttcacacgtcaaaatccatagaagcgcctggacgaggcttaaagtgctttgtgagtgaataggagccattcgctaattctagacccacagtgtctggtggtggggcttcccttgtggggcttctggtggtggttttgccttttcttttccctcctccatgttcttctaaaacatatacatatatacatacacacatacacatattcttcaggtctctaagcccctggaagcagcattgtgtgatattctcagaggcaggggaaaatagagggaaaaatagagactattggtatgttctccccatcagcgagttattgtaactggtcaccactggacgggaaggagaacagaggagagggaaagagaagcccaacctctgtgatcatatgagggccaaggctgagcagtgtagacagagaccctttgaaatgcatttgtctctcaaatagactagtaaacaccgacttctcctttgggttacaaacaccatttcaacctttcgggagagtcagagctaggatgtacaagaactgattctaaccagaagtccgcaagtactgtggacaagaatgcttaaccatgctgcttcagccttgagagacctaggttcttacacatatgcacacacgcatacacacatgcacgcacacacacatacacacatgcacgcacgcacgcatgcacaccaatttatgtttttattaagtgccttgaaaaaaaaaaaaaaaatgtattttccctttatgtaaaaattagtgaatatcttatgaattaaggcattcctctttccctaaccccgatggctccattcccaagtaccccaactcactgctgatcctattaaaggaatgagtcctgctacccgagtggtagtcatagccctagatgactctcaactactcttcaaagggaggcatcaggaatagaatgaaactgtgtgaaggataagattgttcgcatcaagatccaaatcttgatttcatattaacgcctaaggattgcctgtgtgctggaaatatatttgaaactcaaccagtatgcccagcctattgcatatcattgtcagaccatttttgctgctgtggtcacccacgatttcatttgtcttatacccaggtgaaaggggaagggtgaatgggactggctggttcctttaaatgttaacttatggaaatgctagttcaaatggtaatgtcacagtgttttgtatgcagagagcaagagttcaaccaacagctgtttattcatgtgtgtgtgtctttgctgctttgagttctctgtatctactgtgtatgtgaatggtcatgtgggactcagtggtggtgttgtgactttgacctagggtccgagtgtcacagctgatcttggcactcggcactcattggcacagtggtaattagagggtaaaagttaagctgtcaagcccaaggcgttagccttagggctcccccctgagtcggcccacagttgtagcagatttaacatgtccctttctcttaacctccatagtgggagg

SEQ ID NO: 246 - DNA, 6010 bp, Homo sapiens
  misc_feature: Incyte ID No: 1092427.6
cgtcccgcggtccccggcgggcagctccaccccaatcccggcggccacccggcagccgccccgttcaccaaacaaggcaggcaagttgtgcgctccaaggtgccgcaggagacccagagcggcggaggctctaggctgcaggttcaccagaagcagcagctgcagggggtcaatgtctgtggagggcggtgctgtcatggctggagtaaggcccctggctcccagaggtgcaccaaacctagctgtgttccgccatgtcagaatggagggatgtgtctccggccacaactctgtgtgtgtaaaccagggaccaagggcaaagcctgtgaaacaatagctgcccaggacacctcgtcaccagtctttggagggcagagtcctggggctgcttcctcgtggggccctcctgagcaagcagcaaagcatacttcatctaagaaggcagacactctaccaagagtcagccctgtggcccagatgaccttaaccctcaagccgaagccttcagtgggactcccccagcagatacattctcaagtgactcctctttcttcccagagtgtggtgattcaccatggccagacccaggaatacgtgctcaagcccaagtactttccagcccagaaggggatttcaggagagcagtccactgaaggttctttccctttaagatatgtgcaggatcaagttgcggcaccttttcagctgagtaaccacactggccgcatcaaggtggtctttactccgagcatctgtaaagtgacctgcaccaagggcagctgtcagaacagctgtgagaaggggaacaccaccactctcattagtgagaatggtcatgctgccgacaccctgacggccacgaacttccgagtggtaatttgccatcttccatgtatgaatggtggccagtgcagttcaagggacaaatgtcagtgccctccaaatttcacaggaaaactttgtcagatcccagtccatggtgccagcgtgcctaaactttatcagcattcccagcagccaggcaaggcattggggatgctgataaacgtttagacaccctgacggccacgaacttccgagtggtaatttgccatcttccatgtatgaatggtggccagtgcagttcaagggacaaatgtcagtgccctccaaatttcacaggaaaactttgtcagatcccagtccatggtgccagcgtgcctaaactttatcagcattcccagcagccaggcaaggcattggggacgcatgtcatccattcaacacataccttgcctctgaccgtgactagccagcaaggagtcaaagtgaaatttcctcctaacatagtcaatatccatgtgaaacatcctcctgaagcttccgtccagatacatcaggtttcaagaattgatggcccaacaggccagaagacaaaagaagctcaaccaggccaatcccaagtctcgtaccaagggcttcctgtccagaagacccagaccatacattccacatactcccaccagcaggtcattcctcacgtctaccccgtggctgctaagacacagcttggccggtgcttccaggaaaccattgggtcacagtgtggcaaagcgctccctggcctttcaaagcaagaggactgctgtggaactgtgggtacctcctggggctttaacaaatgccagaaatgccccaagaaaccatcttatcatggatacaaccaaatgatggaatgcctaccgggttataagcgggttaacaacaccttttgccaagatattaatgaatgtcagctacaaggtgtatgccctaatggtgagtgtttgaataccatgggcagctatcgatgtacctgcaaaataggatttgggccggatcctaccttttcaagttgtgttcctgatccccctgtgatctcggaagagaaagggccctgttaccgacttgtcagttctggaagacagtgtatgcaccctctgtctgttcacctcaccaagcagctctgctgttgtagtgtgggcaaggcctggggcccacactgtgagaaatgtccccttccaggcacagctgcttttaaggaaatctgtcctggtggaatgggttatacggtttctggcgttcatagacgcaggccaatccatcaccatgtaggtaaaggacctgtatttgtcaagccaaagaacactcaacctgttgctaaaagtactcatcctccacctctcccagccaaggaagagccagtggaggccctgaccttctcccgggaacacggggccaggagtggcggagccagaagtggcaactgcaccccctgaaaaggaaataccttcattggatcaagagaaaaccaaacttgagcctggtcaaccccagctgtctccaggcatttccactattcatctgcatccacagtttccagtagtgattgaaaaaacatcacctcctgtgcctgttgaagtagctcctgaagcttctacgtctagtgccagccaagtgattgctcctactcaagtgacagaaatcaatgaatgtactgtgaaccctgatatctgtggagcaggacactgcattaacctaccagtgagatatacctgtatatgctacgagggctacaggttcagtgaacaacagaggaaatgtgtggatattgatgagtgtactcaggtccaacacctctgctcccagggccgctgtgaaaacaccgagggaagtttcttgtgcatttgcccagcaggatttatggccagtgaggagggtactaactgcatagatgttgacgaatgcctgaggccggacgtctgtggggaggggcactgtgtcaatactgtgggggccttccggtgtgaatactgtgacagcgggtaccgcatgactcagagaggccgttgtgaggatattgatgaatgtttgaatccaagcacttgtccagatgagcagtgtgtgaattctcctggatcttaccagtgcgttccctgcacagaaggattccgaggctggaatggacagtgccttgatgtggacgagtgcctggaaccaaacgtctgcgcaaatggtgattgttccaaccttgaaggctcctacatgtgttcatgccacaaaggctatacccggactccggaccacaagcactgtagagatattgatgaatgtcagcaagggaatctatgtgtaaacgggcagtgcaaaaataccgagggctccttcaggtgcacctgtggacaggggtaccagctgtcggcagctaaagaccagtgtgaagacattgatgaatgccagcaccgtcatctctgtgctcatgggcagtgcaggaacactgagggctcttttcaatgtgtgtgtgaccagggttacagagcatctgggcttggagaccactgtgaagatatcaatgaatgcttggaggacaagagtgtttgccagagaggagactgcattaatactgcagggtcctatgattgtacttgtccggatggatttcagctagatgacaataaaacatgtcaagatattaatgaatgtgaacatccagggctctgtggtccacaaggggagtgcctaaacacagagggttctttccattgtgtctgccagcagggtttctcaatctctgcagatggccgtacgtgtgaagatattgatgaatgtgtaaacaacactgtttgtgacagtcacgggttttgtgacaatacagctggctccttccgctgcctctgttatcagggctttcaagccccacaggatgggcaagggtgtgtggatgtgaatgaatgtgaactgctcagtggggtgtgtggtgaagccttctgtgaaaacgtggaagggtccttcctgtgcgtgtgtgctgatgaaaaccaagagtacagccccatgactgggcagtgccgctcccggacctccacagatttagatgtagatgtagatcaacccaaagaagaaaagaaagaatgctactataatctcaatgacgccagtctctgtgataatgtgttggcccccaatgtcacgaaacaagaatgctgctgtacatcaggcgcgggatggggagataactgcgaaatcttcccctgcccggtcttgggaactgctgagttcactgaaatgtgtcccaaagggaaaggttttgtgcctgctggagaatcatcttctgaagctggtggtgagaactataaagatgcagatgaatgcctactttttggacaagaaatctgcaaaaatggtttctgtttgaacactcggcctgggtatgaatgctactgtaagcaagggacgtactatgatcctgtgaaactgcagtgctttgatatggatgaatgtcaagaccccagtagttgtattgatggccagtgtgttaatacagagggctcttacaactgcttctgtactcaccccatggtcctggatgcgtcagaaaaaagatgtatacgaccggctgagtcaaacgaacaaatagaagaaactgatgtctaccaagatttgtgctgggaacatctgagtgatgaatacgtgtgtagccggcctcttgtgggcaagcagacaacgtacactgagtgctgctgtctgtatggagaggcctggggcatgcagtgtgccctctgccccctgaaggattcagatgactatgctcagctgtgtaacatccccgtgacgggacgccggcagccatatggacgggacgccttggttgacttcagtgaacagtatactccagaagccgatccctacttcatccaagaccgttttctaaatagctttgaggagttacaggctgaggaatgcggcatcctcaatggatgtgaaaatggtcgctgtgtgagggtccaggaaggttacacctgcgattgctttgatgggtatcacttggatacggccaagatgacctgtgtcgatgtaaatgaatgcgatgagttgaacaaccggatgtctctctgcaagaatgccaagtgcattaacaccgatggttcctacaagtgtttgtgtctgccaggctacgtgccttctgacaagccaaactactgcactccgttgaataccgccttgaatttagagaaagacagtgacctggagtgaaacagaatctacataacctaagcccatatactctgcactgtgtaaaggaaaagggagaaatgtattatacttgagacattgcacctaccccggaaggctggaaatacggaaacagcatggagttgcaagtcctctgaagacaatgagaggatttaggatgagcccgataggtgtggcagaccaaatggacatttctctaaaaaaccagtatatatagtctgttcatatgtaaaattcaatggaagagaggtggaacagtgctgttattttaaacagaaggttgtattattatgttgttttgtttttttactattgcttgattaaatttggcatttaaatagtggtggaaatattttatataattttcattttttggttgtgcagttccttggctactgtttttcttttacttcagttttttaaaaatctcaaatgaaaaagtcttcgatacaatattgttaagctgtattataagtattgttacacagggttatgcaattcccggcctggagcatttttgaaattcaaattgtctgtcctgtggagcaggcagtgattttgttccaaaactttgtatacacatttggagaaaagtactttatattttcagtgttttgtctgattttaatgtccgttcttagccaagctgctagcaggtgttaattggatccctttccttcactgaaatggaagagtttataagcttacgttagtattgtaatatgtaaagtaagcccaacaaaaatttttaaaaatttgatgatccccaatatatctaccattgtatgttaaataaatcaccatttttgtagaaaaaattctacctgagagtaattgtcaatgagtacatgtgtataagttgtatcccactctccccacttttatcttttccagtggtcttctgttaatgtagtgtcttttacaagttaatcattaaatttgttagatcttgttatgggct

SEQ ID NO: 247 - DNA, 1140 bp, Homo sapiens
  misc_feature: Incyte ID No: 251793.1
gttgggattataggagtgagccaccacaccggccaagatgcttttcaaactgatacagatgacaatgggagcctcataaagatggcttttgtttcttcccttcaaggtcatttacttgtacgagacagaaaaagatagcattggggacatgggatgggggagggagggcaatagtggaacgaactttccatgggaaactttcccttttgtaagttgagggccaggggtagggatattttttagtttgtgattttacatttatctgtacatactttttcaagattgatcatttttataaccatggttttcctgaaatcctcaattcatcaatatgaaggaaatgaaccacatagactttatgcaataaataacagtgcaagtgagtataactctaactgatgttccacaaaacatttttgatttcaggtttgtatgatgtagtttttaatcgtacattttcatatgcttcaaactaacacatttttaaagctttcccccacttttctctctatttgtattgttagccatcttgaagtgatgttgtttaacataaattgtactgttgaatttggctttacgggtgtaaacactgatggtatatcagtatctgagaccccaaactctccaaatactgatggtgcattttattcttgaagtgaaatctgtgcaataaaataacagactgtctgcaaaactggccttcaatcttctgttgtatccagaggtatcattattgatttaaaaaaatctcattaatctctactggtaatttatagggaatctgatcagtgattcaagaacaagtaattctgcattgccttgaataattaaaaagttatattttattcacggtattgcagtggtaatttgtggtcatgaaagcataacctcagtgctctctaggtttcttaagtggggtgactttatggcatctttaatcatcgatcaatgggcagcaatcagaaacaaagttctcagcattatgcagttaatgtccttcatctacttctaacacttagtaaaggaattgattggctaggtataaaaagagaattaacgaaacctattttattggatctttaagtaataatatctaaatacatttcgttcaaacatacatatgtagctgtttggacattt

SEQ ID NO: 248 - DNA, 1185 bp, Homo sapiens
  misc_feature: Incyte ID No: 1622869cB1
gccgtgcgcccttcgccgctgagctcgcagcctccggcgcccacctccacctccagtgtcccgcctcgggccgtcgccctccagcggctcgcgagcgtgggagacgtacctgggcaggcactgtccagcccaggcccaggcacagccgtgaggggcgaggcacggggacatcctggcggccaccatggtggccacgtgcctgcaggtggtgggcttcgtcacgagcttcgtgggctggatcggggtcatcgtgaccacctccaccaatgactgggtggtgacctgcggctacaccatccccacctgccgcaagctggatgagctgggctccaaggggctgtgggccgactgcgtcatggccacggggctgtaccactgcaagcccctggtggacatcctcatcctgccgggctacgtgcaggcctgccgcgccctgatgattgctgcctcggtcctgggtctgccggccattttactgctgctgactgttcttccctgcatccggatgggccaggagcccggtgtggctaagtacaggcgggcccagctggctggtgttttgctcattctgctggctctctgcgcccttgttgccaccatctggttccctgtgtgcgcccaccgtgagaccaccatcgtgagctttggctactccctgtatgcaggctggattggtgctgtgctgtgcctcgtgggtggctgtgtcatcctctgctgcgctggagatgcccaggcctttggtgaaaaccgtttctactacactgcgggctctagctccccgactcatgcgaagagtgcccacgtataagagggctgcccggctgcccacagaggtgctgtagatgctgggcccagggccctaggtttgctcgtcacagtgtggggaagcccattcctctgccaggctctaaagccaaaggtctagaaaagcatcctgtctggcattttgtagtcttaacttctccccatttcccccatcttttggttgccttaaaagaaatctctagctcagataatgcccagacatttttttcccttggtgttgcccctattagctcttttcttgggcattcttttgctgtttattaaaaatatattatatatattttgtttctttaaatttcaaatgttttgcaaacatcactgagttaggtgggggtggggaagagaatacaagatactttt

SEQ ID NO: 249 - DNA, 2216 bp, Homo sapiens
  misc_feature: Incyte ID No: 2581158cB1
gtcaccggcgcggtctatggctgcgacttctctaatgtctgctttggctgcccggctgctgcagcccgcgcacagctgctcccttcgccttcgccctttccacctcgcggcagttcgaaatgaagctgttgtcatttctggaaggaaactggcccagcagatcaagcaggaagtgcggcaggaggtagaagagtgggtggcctcaggcaacaaacggccacacctgagtgtgatcctggttggcgagaatcctgcaagtcactcctatgtcctcaacaaaaccagggcagctgcagttgtgggaatcaacagtgagacaattatgaaaccagcttcaatttcagaggaagaattgttgaatttaatcaataaactgaataatgatgataatgtagatggcctccttgttcagttgcctcttccagagcatattgatgagagaaggatctgcaatgctgtttctccagacaaggatgttgatggctttcatgtaattaatgtaggacgaatgtgtttggatcagtattccatgttaccggctactccatggggtgtgtgggaaataatcaagcgaactggcattccaaccctagggaagaatgtggttgtggctggaaggtcaaaaaacgttggaatgcccattgcaatgttactgcacacagatggggcgcatgaacgtcccggaggtgatgccactgttacaatatctcatcgatatactcccaaagagcagttgaagaaacatacaattcttgcagatattgtaatatctgctgcaggtattccaaatctgatcacagcagatatgatcaaggaaggagcagcagtcattgatgtgggaataaatagagttcacgatcctgtaactgccaaacccaagttggttggagatgtggattttgaaggagtcagacaaaaagctgggtatatcactccagttcctggaggtgttggccccatgacagtggcaatgctaatgaagaataccattattgctgcaaaaaaggtgctgaggcttgaagagcgagaagtgctgaagtctaaagagcttggggtagccactaattaactactgtgtcttctgtgtcacaaacagcactccaggccagctcaagaagcaaagcaggccaatagaaatgcaatatttttaatttattctactgaaatggtttaaaatgatgccttgtatttattgaaagcttaaatgggtgggtgtttctgcacatacctctgcagtacctcaccagggagcattccagtatcatgcagggtcctgtgatctagccaggagcagccattaacctagtgattaatatgggagacattaccatatggaggatggatgcttcactttgtcaagcacctcagttacacattcgccttttctaggattgcatttcccaagtgctattgcaataacagttgatactcattttaggtaccaaaccttttgagttcaactgatcaaaccaaaggaaaagtgttgctagagaaaattagggaaaaggtgaaaaagaaaaaatggtagtaattgagcagaaaaaaattaatttatatatgtattgattggcaaccagatttatctaagtagaactgaattggctaggaaaaaagaaaaactgcatgttaatcattttcctaagctgtccttttgaggcttagtcagtttattgggaaaatgtttaggattattccttgctattagtactcattttatgtatgttacccttcagtaagttctccccattttagttttctaggactgaaaggattcttttctacattatacatgtgtgttgtcatatttggcttttgctatatactttaacttcattgttaaatttttgtattgtatagtttctttggtgtatcttaaaacctatttttgaaaaacaaacttggcttgataatcatttgggcagcttgggtaagtacgcaacttacttttccaccaaagaactgtcagcagctgcctgcttttctgtgatgtatgtatcctgttgacttttccagaaattttttaagagtttgagttactattgaatttaatcagactttctgattaaagggttttctttcttttttaataaaacacatctgtctggtgtggtatgaatttctgaaattctggcttcctatgactcctagttgtgacctaaccagtttttttctcatttaatcaatgtagctatccatatcagtaacacttacttcta

SEQ ID NO: 250 - DNA, 2384 bp, Homo sapiens
  misc_feature: Incyte ID No: 2174441cB1
gaaagtgattgattcggatactgacactgtaggatctggggagagaggaacaaaggaccgtgaaagctgctctgtaaaagctgacacagccctcccaagtgagcaggactgttcttcccactgcaatctgacagtttactgcatgcctggagagaacacagcagtaaaaaccaggtttgctactggaaaaagaggaaagagaagactttcattgacggacccagccatggcagcgtagcagccctgcgtttcagacggcagcagctcgggactctggacgtgtgtttgccctcaagtttgctaagctgctggtttattactgaagaaagaatgtggcagattgttttctttactctgagctgtgatcttgtcttggccgcagcctataacaactttcggaagagcatggacagcataggaaagaagcaatatcaggtccagcatgggtcctgcagctacactttcctcctgccagagatggacaactgccgctcttcctccagcccctacgtgtccaatgctgtgcagagggacgcgccgctcgaatacgatgactcggtgcagaggctgcaagtgctggagaacatcatggaaaacaacactcagtggctaatgaagcttgagaattatatccaggacaacatgaagaaagaaatggtagagatacagcagaatgcagtacagaaccagacggctgtgatgatagaaatagggacaaacctgttgaaccaaacagctgagcaaacgcggaagttaactgatgtggaagcccaagtattaaatcagaccacgagacttgaacttcagctcttggaacactccctctcgacaaacaaattggaaaaacagattttggaccagaccagtgaaataaacaaattgcaagataagaacagtttcctagaaaagaaggtgctagctatggaagacaagcacatcatccaactacagtcaataaaagaagagaaagatcagctacaggtgttagtatccaagcaaaattccatcattgaagaactagaaaaaaaaatagtgactgccacggtgaataattcagttcttcaaaagcagcaacatgatctcatggagacagttaataacttactgactatgatgtccacatcaaactcagctaaggaccccactgttgctaaagaagaacaaatcagcttcagagactgtgctgaagtattcaaatcaggacacaccacaaatggcatctacacgttaacattccctaattctacagaagagatcaaggcctactgtgacatggaagctggaggaggcgggtggacaattattcagcgacgtgaggatggcagcgttgattttcagaggacttggaaagaatataaagtgggatttggtaacccttcaggagaatattggctgggaaatgagtttgtttcgcaactgactaatcagcaacgctatgtgcttaaaatacaccttaaagactgggaagggaatgaggcttactcattgtatgaacatttctatctctcaagtgaagaactcaattataggattcaccttaaaggacttacagggacagccggcaaaataagcagcatcagccaaccaggaaatgattttagcacaaaggatggagacaacgacaaatgtatttgcaaatgttcacaaatgctaacaggaggctggtggtttgatgcatgtggtccttccaacttgaacggaatgtactatccacagaggcagaacacaaataagttcaacggcattaaatggtactactggaaaggctcaggctattcgctcaaggccacaaccatgatgatccgaccagcagatttctaaacatcccagtccacctgaggaactgtctcgaactattttcaaagacttaagcccagtgcactgaaagtcacggctgcgcactgtgtcctcttccaccacagagggcgtgtgctcggtgctgacgggacccacatgctccagattagagcctgtaaactttatcacttaaacttgcatcacttaacggaccaaagcaagaccctaaacatccataattgtgattagacagaacacctatgcaaagatgaacccgaggctgagaatcagactgacagtttacagacgctgctgtcacaaccaagaatgttatgtgcaagtttatcagtaaataactggaaaacagaacacttatgttatacaatacagatcatcttggaactgcattcttctgagcactgtttatacactgtgtaaatacccatatgtcctgaattcaccatcactatcacaattaaaaggaagaaaaaaactctctaagccataaaaagacatattcagggatattctgagaaggggttactagaagtttaatatttggaaaaacagttagtgcatttttactc

SEQ ID NO: 251 - DNA, 473 bp, Homo sapiens
  misc_feature: Incyte ID No: 235191.3
  unsure 115, 119: a, t, c, g, or other
gttttaggagagatggcataaccccatctatatctcatatatatacacatatatgtgtgtgtgtatacatatatatgtgtgtgtgtgtatgtgggcatatatatatatatataanattnaggggaaagctcacccactgacctttgctatgcccaaaagtgtactccacattccaacaaatgtgttttctccccagatgtctggcgataaagggatttctgccttccctgaatcagacaaccttttcaaatgggtagggaccatccatggagcagctggaacagtatatgaagacctgaggtataagctctcgctagagttccccagtggctacccttacaatgcgcccacagtgaagttcctcacgccctgctatcaccccaacgtggacacccagggtaacatatgcctggacatcctgaaggaaaaagtggtctgccctgtatgatgtcaggaccattctgctctccatc

SEQ ID NO: 252 - DNA, 834 bp, Homo sapiens
  misc_feature: Incyte ID No: 235191.4
gcccccagagggttacaattcaaacgcgggcgggcgggcccgcagtcctgcagttgcagtcgtgttctccgagttcctgtctctctgccaacgccgcccggatggcttcccaaaaccgcgacccagccgccactagcgtcgccgccgcccgtaaaggagctgagccgagcgggggcgccgcccggggtccggtgggcaaaaggctacagcaggagctgatgaccctcatgatgtctggcgataaagggatttctgccttccctgaatcagacaaccttttcaaatgggtagggaccatccatggagcagctggaacagtatatgaagacctgaggtataagctctcgctagagttccccagtggctacccttacaatgcgcccacagtgaagttcctcacgccctgctatcaccccaacgtggacacccagggtaacatatgcctggacatcctgaaggaaaagtggtctgccctgtatgatgtcaggaccattctgctctccatccagagccttctaggagaacccaacattgatagtcccttgaacacacatgctgccgagctctggaaaaaccccacagcttttaagaagtacctgcaagaaacctactcaaagcaggtcaccagccaggagccctgacccaggctgcccagcctgtccttgtgtcgtctttttaatttttccttagatggtctgtcctttttgtgatttctgtataggactctttatcttgagctgtggtatttttgttttgtttttgtcttttaaattaagcctcggttgagcccttgtatattaaataaatgcatttttgtccttttttagacaaaaa

SEQ ID NO: 253 - DNA, 5037 bp, Homo sapiens
  misc_feature: Incyte ID No: 1867417cB1
gcgtctgtggagaagcggcttggtcgggggtggtctcgtggggtcctgcctgtttagtcgctttcagggttcttgagccccttcacgaccgtcaccatggaagtgtcaccattgcagcctgtaaatgaaaatatgcaagtcaacaaaataaagaaaaatgaagatgctaagaaaagactgtctgttgaaagaatctatcaaaagaaaacacaattggaacatattttgctccgcccagacacctacattggttctgtggaattagtgacccagcaaatgtgggtttacgatgaagatgttggcattaactatagggaagtcacttttgttcctggtttgtacaaaatctttgatgagattctagttaatgctgcggacaacaaacaaagggacccaaaaatgtcttgtattagagtcacaattgatccggaaaacaatttaattagtatatggaataatggaaaaggtattcctgttgttgaacacaaagttgaaaagatgtatgtcccagctctcatatttggacagctcctaacttctagtaactatgatgatgatgaaaagaaagtgacaggtggtcgaaatggctatggagccaaattgtgtaacatattcagtaccaaatttactgtggaaacagccagtagagaatacaagaaaatgttcaaacagacatggatggataatatgggaagagctggtgagatggaactcaagcccttcaatggagaagattatacatgtatcacctttcagcctgatttgtctaagtttaaaatgcaaagcctggacaaagatattgttgcactaatggtcagaagagcatatgatattgctggatccaccaaagatgtcaaagtctttcttaatggaaataaactgccagtaaaaggatttcgtagttatgtggacatgtatttgaaggacaagttggatgaaactggtaactccttgaaagtaatacatgaacaagtaaaccacaggtgggaagtgtgtttaactatgagtgaaaaaggctttcagcaaattagctttgtcaacagcattgctacatccaagggtggcagacatgttgattatgtagctgatcagattgtgactaaacttgttgatgttgtgaagaagaagaacaagggtggtgttgcagtaaaagcacatcaggtgaaaaatcacatgtggatttttgtaaatgccttaattgaaaacccaacctttgactctcagacaaaagaaaacatgactttacaacccaagagctttggatcaacatgccaattgagtgaaaaatttatcaaagctgccattggctgtggtattgtagaaagcatactaaactgggtgaagtttaaggcccaagtccagttaaacaagaagtgttcagctgtaaaacataatagaatcaagggaattcccaaactcgatgatgccaatgatgcagggggccgaaactccactgagtgtacgcttatcctgactgagggagattcagccaaaactttggctgtttcaggccttggtgtggttgggagagacaaatatggggttttccctcttagaggaaaaatactcaatgttcgagaagcttctcataagcagatcatggaaaatgctgagattaacaatatcatcaagattgtgggtcttcagtacaagaaaaactatgaagatgaagattcattgaagacgcttcgttatgggaagataatgattatgacagatcaggaccaagatggttcccacatcaaaggcttgctgattaattttatccatcacaactggccctctcttctgcgacatcgttttctggaggaatttatcactcccattgtaaaggtatctaaaaacaagcaagaaatggcattttacagccttcctgaatttgaagagtggaagagttctactccaaatcataaaaaatggaaagtcaaatattacaaaggtttgggcaccagcacatcaaaggaagctaaagaatactttgcagatatgaaaagacatcgtatccagttcaaatattctggtcctgaagatgatgctgctatcagcctggcctttagcaaaaaacagatagatgatcgaaaggaatggttaactaatttcatggaggatagaagacaacgaaagttacttgggcttcctgaggattacttgtatggacaaactaccacatatctgacatataatgacttcatcaacaaggaacttatcttgttctcaaattctgataacgagagatctatcccttctatggtggatggtttgaaaccaggtcagagaaaggttttgtttacttgcttcaaacggaatgacaagcgagaagtaaaggttgcccaattagctggatcagtggctgaaatgtcttcttatcatcatggtgagatgtcactaatgatgaccattatcaatttggctcagaattttgtgggtagcaataatctaaacctcttgcagcccattggtcagtttggtaccaggctacatggtggcaaggattctgctagtccacgatacatctttacaatgctcagctctttggctcgattgttatttccaccaaaagatgatcacacgttgaagtttttatatgatgacaaccagcgtgttgagcctgaatggtacattcctattattcccatggtgctgataaatggtgctgaaggaatcggtactgggtggtcctgcaaaatccccaactttgatgtgcgtgaaattgtaaataacatcaggcgtttgatggatggagaagaacctttgccaatgcttccaagttacaagaacttcaagggtactattgaagaactggctccaaatcaatatgtgattagtggtgaagtagctattcttaattctacaaccattgaaatctcagagcttcccgtcagaacatggacccagacatacaaagaacaagttctagaacccatgttgaatggcaccgagaagacacctcctctcataacagactatagggaataccatacagataccactgtgaaatttgttgtgaagatgactgaagaaaaactggcagaggcagagagagttggactacacaaagtcttcaaactccaaactagtctcacatgcaactctatggtgctttttgaccacgtaggctgtttaaagaaatatgacacggtgttggatattctaagagacttttttgaactcagacttaaatattatggattaagaaaagaatggctcctaggaatgcttggtgctgaatctgctaaactgaataatcaggctcgctttatcttagagaaaatagatggcaaaataatcattgaaaataagcctaagaaagaattaattaaagttctgattcagaggggatatgattcggatcctgtgaaggcctggaaagaagcccagcaaaaggttccagatgaagaagaaaatgaagagagtgacaacgaaaaggaaactgaaaagagtgactccgtaacagattctggaccaaccttcaactatcttcttgatatgcccctttggtatttaaccaaggaaaagaaagatgaactctgcaggctaagaaatgaaaaagaacaagagctggacacattaaaaagaaagagtccatcagatttgtggaaagaagacttggctacatttattgaagaattggaggctgttgaagccaaggaaaaacaagatgaacaagtcggacttcctgggaaaggggggaaggccaaggggaaaaaaacacaaatggctgaagttttgccttctccgcgtggtcaaagagtcattccacgaataaccatagaaatgaaagcagaggcagaaaagaaaaataaaaagaaaattaagaatgaaaatactgaaggaagccctcaagaagatggtgtggaactagaaggcctaaaacaaagattagaaaagaaacagaaaagagaaccaggtacaaagacaaagaaacaaactacattggcatttaagccaatcaaaaaaggaaagaagagaaatccctggtctgattcagaatcagataggagcagtgacgaaagtaattttgatgtccctccacgagaaacagagccacggagagcagcaacaaaaacaaaattcacaatggatttggattcagatgaagatttctcagattttgatgaaaaaactgatgatgaagattttgtcccatcagatgctagtccacctaagaccaaaacttccccaaaacttagtaacaaagaactgaaaccacagaaaagtgtcgtgtcagaccttgaagctgatgatgttaagggcagtgtaccactgtcttcaagccctcctgctacacatttcccagatgaaactgaaattacaaacccagttcctaaaaagaatgtgacagtgaagaagacagcagcaaaaagtcagtcttccacctccactaccggtgccaaaaaaagggctgccccaaaaggaactaaaagggatccagctttgaattctggtgtctctcaaaagcctgatcctgccaaaaccaagaatcgccgcaaaaggaagccatccacttctgatgattctgactctaattttgagaaaattgtttcgaaagcagtcacaagcaagaaatccaagggggagagtgatgacttccatatggactttgactcagctgtggctcctcgggcaaaatctgtacgggcaaagaaacctataaagtacctggaagagtcagatgaagatgatctgttttaaaatgtgaggcgattattttaagtaattatcttaccaagcccaagactggttttaaagttacctgaagctcttaacttcctcccctctgaatttagtttggggaaggtgtttttagtacaagacatcaaagtgaagtaaagcccaagtgttctttagctttttataatactgtctaaatagtgaccatctcatgggcattgttttcttctctgctttgtctgtgttttgagtctgctttcttttgtctttaaaacctgatttttaagttcttctgaactgtagaaatagctatctgatcacttcagcgtaaagcagtgtgtttattaaccatccactaagctaaaa

SEQ ID NO: 254 - DNA, 4368 bp, Homo sapiens
  misc_feature: Incyte ID No: 1285632cB1
gcaggcggcggggagaaagactctctcacctggtcttgcggctgtggccaccgccggccaggggtgtggagggcgtgctgccggagacgtccgccgggctctgcagttccgccgggggtcgggcagctatggagccgcggcccacggcgccctcctccggcgccccgggactggccggggtcggggagacgccgtcagccgctgcgctggccgcagccagggtggaactgcccggcacggctgtgccctcggtgccggaggatgctgcgcccgcgagccgggacggcggcggggtccgcgatgagggccccgcggcggccggggacgggctgggcagacccttggggcccaccccgagccagagccgtttccaggtggacctggtttccgagaacgccgggcgggccgctgctgcggcggcggcggcggcggcggcagcggcggcggctggtgctggggcgggggccaagcagacccccgcggacggggaagccagcggcgagagcgagccagctaaaggcagcgaggaagccaagggccgcttccgcgtgaacttcgtggacccagctgcctcctcgtcggctgaagacagcctgtcagatgctgccggggtcggagtcgacgggcccaacgtgagcttccagaacggcggggacacggtgctgagcgagggcagcagcctgcactccggcggcggcggcggcagtgggcaccaccagcactactattatgatacccacaccaacacctactacctgcgcaccttcggccacaacaccatggacgctgtgcccaggatcgatcactaccggcacacagccgcgcagctgggcgagaagctgctccggcctagcctggcggagctccacgacgagctggaaaaggaaccttttgaggatggctttgcaaatggggaagaaagtactccaaccagagatgctgtggtcacgtatactgcagaaagtaaaggagtcgtgaagtttggctggatcaagggtgtattagtacgttgtatgttaaacatttggggtgtgatgcttttcattagattgtcatggattgtgggtcaagctggaataggtctatcagtccttgtaataatgatggccactgttgtgacaactatcacaggattgtctacttcagcaatagcaactaatggatttgtaagaggaggaggagcatattatttaatatctagaagtctagggccagaatttggtggtgcaattggtctaatcttcgcctttgccaacgctgttgcagttgctatgtatgtggttggatttgcagaaaccgtggtggagttgcttaaggaacattccatacttatgatagatgaaatcaatgatatccgaattattggagccattacagtcgtgattcttttaggtatctcagtagctggaatggagtgggaagcaaaagctcagattgttcttttggtgatcctacttcttgctattggtgatttcgtcataggaacatttatcccactggagagcaagaagccaaaagggttttttggttataaatctgaaatatttaatgagaactttgggcccgattttcgagaggaagagactttcttttctgtatttgccatcttttttcctgctgcaactggtattctggctggagcaaatatctcaggtgatcttgcagatcctcagtcagccatacccaaaggaacactcctagccattttaattactacattggtttacgtaggaattgcagtatctgtaggttcttgtgttgttcgagatgccactggaaacgttaatgacactatcgtaacagagctaacaaactgtacttctgcagcctgcaaattaaactttgatttttcatcttgtgaaagcagtccttgttcctatggcctaatgaacaacttccaggtaatgagtatggtgtcaggatttacaccactaatttctgcaggtatattttcagccactctttcttcagcattagcatccctagtgagtgctcccaaaatatttcaggctctatgtaaggacaacatctacccagctttccagatgtttgctaaaggttatgggaaaaataatgaacctcttcgtggctacatcttaacattcttaattgcacttggattcatcttaattgctgaactgaatgttattgcaccaattatctcaaacttcttccttgcatcatatgcattgatcaatttttcagtattccatgcatcacttgcaaaatctccaggatggcgtcctggattcaaatactacaacatgtggatatcacttcttggagcaattctttgttgcatagtaatgttcgtcattaactggtgggctgcattgctaacatatgtgatagtccttgggctgtatatttatgttacctacaaaaaaccagatgtgaattggggatcctctacacaagccctgacttacctgaatgcactgcagcattcaattcgtctttctggagtggaagaccacgtgaaaaactttaggccacagtgtcttgttatgacaggtgctccaaactcacgtccagctttacttcatcttgttcatgatttcacaaaaaatgttggtttgatgatctgtggccatgtacatatgggtcctcgaagacaagccatgaaagagatgtccatcgatcaagccaaatatcagcgatggcttattaagaacaaaatgaaggcattttatgctccagtacatgcagatgacttgagagaaggtgcacagtatttgatgcaggctgctggtcttggtcgtatgaagccaaacacacttgtccttggatttaagaaagattggttgcaagcagatatgagggatgtggatatgtatataaacttatttcatgatgcttttgacatacaatatggagtagtggttattcgcctaaaagaaggtctggatatatctcatcttcaaggacaagaagaattattgtcatcacaagagaaatctcctggcaccaaggatgtggtagtaagtgtggaatatagtaaaaagtccgatttagatacttccaaaccactcagtgaaaaaccaattacacacaaagttgaggaagaggatggcaagactgcaactcaaccactgttgaaaaaagaatccaaaggccctattgtgcctttaaatgtagctgaccaaaagcttcttgaagctagtacacagtttcagaaaaaacaaggaaagaatactattgatgtctggtggctttttgatgatggaggtttgaccttattgataccttaccttctgacgaccaagaaaaaatggaaagactgtaagatcagagtattcattggtggaaagataaacagaatagaccatgaccggagagcgatggctactttgcttagcaagttccggatagacttttctgatatcatggttctaggagatatcaataccaaaccaaagaaagaaaatattatagcttttgaggaaatcattgagccatacagacttcatgaagatgataaagagcaagatattgcagataaaatgaaagaagatgaaccatggcgaataacagataatgagcttgaactttataagaccaagacataccggcagatcaggttaaatgagttattaaaggaacattcaagcacagctaatattattgtcatgagtctcccagttgcacgaaaaggtgctgtgtctagtgctctctacatggcatggttagaagctctatctaaggacctaccaccaatcctcctagttcgtgggaatcatcagagtgtccttaccttctattcataaatgttctatacagtggacagccctccagaatggtacttcagtgcctagtgtagtaactgaaatcttcaatgacacattaacatcacaatggcgaatggtgacttttctttcacgatttcattaatttgaaagcacacaggaaagttgctccattgataacgtgtatggagacttcggttttagtcaattccatatctcaatcttaatggtgattcttctctgttgaactgaagtttgtgagagtagttttcctttgctacttgaatagcaataaaagcgtgttaactttttgattgatgaaagaagtacaaaaagcctttagccttgaggtgccttctgaaattaaccaaatttcatccatatatcctcttttataaacttatagaatgtcaaactttgccttcaactgtttttatttctagtctcttccactttaaaacaaaatgaacactgcttgtcttcttccattgaccatttagtgttgagtactgtatgtgttttgttaattctataaaggtatctgttagatattaaaggtgagaattagggcaggttaatcaaaaatggggaaggggaaatggtaaccaaaaaaaaaaaaaaa

SEQ ID NO: 255 - DNA, 3756 bp, Homo sapiens
  misc_feature: Incyte ID No: 336992.5
taaattaatctctcccccccaaaaaatgcgaacttaggctgttacacaactgctggggtctgttctcgccgcccgcccggcagtcaggcagcgtcgccgccgtggtagcagcctcagccgtttctggagtctcgggcccacagtcaccgccgcttacctgcgcctcctcgagcctccggagtccccgtccgcccgcacaggccggttcgccgtctgcgtctcccccacgccgcctcgcctgccgccgcgctcgtccctccgggccgacatgagtggggaccacctccacaacgattcccagatcgaagcggatttccgattgaatgattctcataaacacaaagataaacacaaagatcgagaacaccggcacaaagaacacaagaaggagaaggaccgggaaaagtccaagcatagcaacagtgaacataaagattctgaaaagaaacacaaagagaaggagaagaccaaacacaaagatggaagctcagaaaagcataaagacaaacataaagacagagacaaggaaaaacgaaaagaggaaaaggttcgagcctctggggatgcaaaaataaagaaggagaaggaaaatggcttctctagtccaccacaaattaaagatgaacctgaagatgatggctattttgttcctcctaaagaggatataaagccattaaagagacctcgagatgaggatgatgctgattataaacctaagaaaattaaaacagaagataccaagaaggagaagaaaagaaaactagaagaagaagaggatggtaaattgaaaaaacccaagaataaagataaagataaaaaagttcctgagccagataacaagaaaaagaagccgaagaaagaagaggaacagaagtggaaatggtgggaagaagagcgctatcctgaaggcatcaagtggaaattcctagaacataaaggtccagtatttgccccaccatatgagcctcttccagagaatgtcaagttttattatgatggtaaagtcatgaagctgagccccaaagcagaggaagtagctacgttctttgcaaaaatgctcgaccatgaatatactaccaaggaaatatttaggaaaaatttctttaaagactggagaaaggaaatgactaatgaagagaagaatattatcaccaacctaagcaaatgtgattttacccagatgagccagtatttcaaagcccagacggaagctcggaaacagatgagcaaggaagagaaactgaaaatcaaagaggagaatgaaaaattactgaaagaatatggattctgtattatggataaccacaaagagaggattgctaacttcaagatagagcctcctggacttttccgtggccgcggcaaccaccccaagatgggcatgctgaagagacgaatcatgcccgaggatataatcatcaactgtagcaaagatgccaaggttccttctcctcctccaggacataagtggaaagaagtccggcatgataacaaggttacttggctggtttcctggacagagaacatccaaggttccattaaatacatcatgcttaaccctagttcacgaatcaagggtgagaaggactggcagaaatacgagactgctcggcggctgaaaaaatgtgtggacaagatccggaaccagtatcgagaagactggaagtccaaagagatgaaagtccggcagagagctgtagccctgtacttcatcgacaagcttgctctgagagcaggcaatgaaaaggaggaaggagaaacagcggacactgtgggctgctgctcacttcgtgtggagcacatcaatctacacccagagttggatggtcaggaatatgtggtagagtttgacttcctcgggaaggactccatcagatactataacaaggtccctgttgagaaacgagtttttaagaacctacaactatttatggagaacaagcagcccgaggatgatctttttgatagactcaatactggtattctgaataagcatcttcaggatctcatggagggcttgacagccaaggtattccgtacatacaatgcctccatcacgctacagcagcagctaaaagaactgacagccccggatgagaacatcccagcgaagatcctttcttataaccgtgccaatcgagctgttgcaattctttgtaaccatcagagggcaccaccaaaaacttttgagaagtctatgatgaacttgcaaactaagattgatgccaagaaggaacagctagcagatgcccggagagacctgaaaagtgctaaggctgatgccaaggtcatgaaggatgcaaagacgaagaaggtagtagagtcaaagaagaaggctgttcagagactggaggaacagttgatgaagctggaagttcaagccacagaccgagaggaaaataaacagattgccctgggaacctccaaactcaattatctggaccctaggatcacagtggcttggtgcaagaagtggggtgtcccaattgagaagatttacaacaaaacccagcgggagaagtttgcctgggccattgacatggctgatgaagactatgagttttagccagtctcaagaggcagagttctgtgaagaggaacagtgtggtttgggaaagatggataaactgagcctcacttgccctcgtgcctgggggagagaggcagcaagtcttaacaaaccaacatctttgcgaaaagataaacctggagatattataagggagagctgagccagttgtcctatggacaacttatttaaaaatatttcagatatcaaaattctagctgtatgatttgttttgaattttgtttttattttcaagagggcaagtggatgggaatttgtcagcgttctaccaggcaaattcactgtttcactgaaatgtttggattctcttagctactgtatgcaaagtccgattatattggtgcgtttttacagttagggttttgcaataacttctatattttaatagaaataaattcctaaactcccttccctctctcccatttcaggaatttaaaattaagtagaacaaaaaacccagcgcacctgttagagtcgtcactctctattgtcatggggatcaattttcattaaacttgaagcagtcgtggctttggcagtgttttggttcagacacctgttcacagaaaaagcatgatgggaaaatatttcctgacttgagtgttcctttttaaatgtgaatttttatttctttttaattattttaaaatatttaaacctttttcttgatcttaaagatcgtgtagattggggttggggagggatgaagggcgagtgaatctaaggataatgaaataatcagtgactgaaaccattttcccatcatcctttgttctgagcattcgctgtaccctttaagatatccatctttttctttttaaccctaatctttcacttgaaagattttattgtataaaaagtttcacaggtcaataaacttagaggaaaatgagtatttggtccaaaaaaaggaaaaataatcaagattttagggcttttattttttcttttgtaattgtgtaaaaaatggaaaaaaacataaaaagcagaattttaatgtgaagacattttttgctataatcattagttttagaggcattgttagtttagtgtgtgtgcagagtccatttcccacatctttcctcaagtatcttctatttttatcatgaattcccttttaatcaactgtaggttatttaaaataaattcctacaacttaatggaaa

SEQ ID NO: 256 - DNA, 2479 bp, Homo sapiens
  misc_feature: Incyte ID No: 1909266cB1
ggcgcgtgcggttgggaacgcggagcggacggattcgattcaacggggttccggaccgcgctgcgctatggagcaggtcaatgagctgaaggagaaaggcaacaaggccctgagcgtgggtaacatcgatgatgccttacagtgctactccgaagctattaagctggatccccacaaccacgtgctgtacagcaaccgttctgctgcctatgccaagaaaggagactaccagaaggcttatgaggatggctgcaagactgtcgacctaaagcctgactggggcaagggctattcacgaaaagcagcagctctagagttcttaaaccgctttgaagaagccaagcgaacctatgaggagggcttaaaacacgaggcaaataaccctcaactgaaagagggtttacagaatatggaggccaggttggcagagagaaaattcatgaaccctttcaacatgcctaatctgtatcagaagttggagagtgatcccaggacaaggacactactcagtgatcctacctaccgggagctgatagagcagctacgaaacaagccttctgacctgggcacgaaactacaagatccccggatcatgaccactctcagcgtcctccttggggtcgatctgggcagtatggatgaggaggaagagattgcaacacctccaccaccaccccctcccaaaaaggagaccaagccagagccaatggaagaagatcttccagagaataagaagcaggcactgaaagaaaaagagctggggaacgatgcctacaagaagaaagactttgacacagccttgaagcattacgacaaagccaaggagctggaccccactaacatgacttacattaccaatcaagcagcggtatactttgaaaagggcgactacaataagtgccgggagctttgtgagaaggccattgaagtggggagagaaaaccgagaagactatcgacagattgccaaagcatatgctcgaattggcaactcctacttcaaagaagaaaagtacaaggatgccatccatttctataacaagtctctggcagagcaccgaaccccagatgtgctcaagaaatgccagcaggcagagaaaatcctgaaggagcaagagcggctggcctacataaaccccgacctggctttggaggagaagaacaaaggcaacgagtgttttcagaaaggggactatccccaggccatgaagcattatacagaagccatcaaaaggaacccgaaagatgccaaattatacagcaatcgagctgcctgctacaccaaactcctggagttccagctggcactcaaggactgtgaggaatgtatccagctggagccgaccttcatcaagggttatacacggaaagccgctgcgctggaagcgatgaaggactacaccaaagccatggatgtgtaccagaaggcgctagacctggactccagctgtaaggaggcggcagacggctaccagcgctgtatgatggcgcagtacaaccggcacgacagccccgaagatgtgaagcgacgagccatggccgaccctgaggtgcagcagatcatgagtgacccagccatgcgccttatcctggaacagatgcagaaggacccccaggcactcagcgaacacttaaagaatcctgtaatagcacagaagatccagaagctgatggatgtgggtctgattgcaattcggtgatgacttgttcatccccccttcccttcgccctcatgtggaaagaggagctgggaccgcggcgagcagcacggagcggaagggagagcaggggagagaaggcctcatctctctatatttatacataaccccggggaagacacagagactcgtacctgcgctgtttgtgccgccgctgcctctgggccctcccagcacacgcatggtctcttcaccgctgccctcgagttccatgtctctttcccctgcccctagttgctgtctcggctgctctcccatagttggttttttttttatttggggcagtgggcatgttatggggaggggagggggttcttccagcctcaggtcccagctgtctcacgttgtttattctgcgtccccttctccaataaaacaagccagttgggcgtggttaaaaaaaaaaaagatgaaagaaaaccgcggccgcagcgttagtccctttagtgaggggttaatgttagccttgcagctggccgtcggttttacaacggtcgtgacttgggaagcgcggtggcggtaccctaggctaaatcggacttgatggaacatcgcccgtttgcgccagcttggtgaagtatgcgaggaagctcagcaccgggttcgcctttcccagcagtttcgcagctcgaatggcgaacttgaacgcggcttgtgacgcatgttaaggcggcggctggtggtggtagccctgtgtggcctagagttggcagccctcgaggggtgcattggcgttgtgccttgcgtgctgcaggtggggga

SEQ ID NO: 257 - DNA, 2375 bp, Homo sapiens
  misc_feature: Incyte ID No: 1214953.16
gcagattgcagggcccgggctgacgggaagtgggtgggagctgcctgcacacgcggtgccgcggggcgggagtagaggcggagggaggggacacgggctcattgcggtgtgcgccctgcactctgtccctcactcgccgccgacgacctgtctcgccgagcgcacgccttgccgccgccccgcagaaatgcttcggttacccacagtctttcgccagatgagaccggtgtccagggtactggctcctcatctcactcgggcttatgccaaagatgtaaaatttggtgcagatgcccgagccttaatgcttcaaggtgtagaccttttagccgatgctgtggccgttacaatggggccaaagggaagaacagtgattattgagcagagttggggaagtcccaaagtaacaaaagatggtgtgactgttgcaaagtcaattgacttaaaagataaatacaagaacattggagctaaacttgttcaagatgttgccaataacacaaatgaagaagctggggatggcactaccactgctactgtactggcacgctctatagccaaggaaggcttcgagaagattagcaaaggtgctaatccagtggaaatcaggagaggtgtgatgttagctgttgatgctgtaattgctgaacttaaaaagcagtctaaacctgtgaccacccctgaagaaattgcacaggttgctacgatttctgcaaacggagacaaagaaattggcaatatcatctctgatgcaatgaaaaaagttggaagaaagggtgtcatcacagtaaaggatggaaaaacactgaatgatgaattagaaattattgaaggcatgaagtttgatcgaggctatatttctccatactttattaatacatcaaaaggtcagaaatgtgaattccaggatgcctatgttctgttgagtgaaaagaaaatttctagtatccagtccattgtacctgctcttgaaattgccaatgctcaccgtaagcctttggtcataatcgctgaagatgttgatggagaagctctaagtacactcgtcttgaataggctaaaggttggtcttcaggttgtggcagtcaaggctccagggtttggtgacaatagaaagaaccagcttaaagatatggctattgctactggtggtgcagtgtttggagaagagggattgaccctgaatcttgaagacgttcagcctcatgacttaggaaaagttggagaggtcattgtgaccaaagacgatgccatgctcttaaaaggaaaaggtgacaaggctcaaattgaaaaacgtattcaagaaatcattgagcagttagatgtcacaactagtgaatatgaaaaggaaaaactgaatgaacggcttgcaaaactttcagatggagtggctgtgctgaaggttggtgggacaagtgatgttgaagtgaatgaaaagaaagacagagttacagatgcccttaatgctacaagagctgctgttgaagaaggcattgttttgggagggggttgtgccctccttcgatgcattccagccttggactcattgactccagctaatgaagatcaaaaaattggtatagaaattattaaaagaacactcaaaattccagcaatgaccattgctaagaatgcaggtgttgaaggatctttgatagttgagaaaattatgcaaagttcctcagaagttggttatgatgctatggctggagattttgtgaatatggtggaaaaaggaatcattgacccaacaaaggttgtgagaactgctttattggatgctgctggtgtggcctctctgttaactacagcagaagttgtagtcacagaaattcctaaagaagagaaggaccctggaatgggtgcaatgggtggaatgggaggtggtatgggaggtggcatgttctaactcctagactagtgctttacctttattaatgaactgtgacaggaagcccaaggcagtgttcctcaccaataacttcagagaagtcagttggagaaaatgaagaaaaaggctggctgaaaatcactataaccatcagttactggtttcagttgacaaaatatataatggtttactgctgtcattgtccatgcctacagataatttattttgtatttttgaataaaaaacatttgtacattcctgatactgggtacaagagccatgtaccagtgtactgctttcaacttaaatcactgaggcatttttactactattctgttaaaatcaggattttagtgcttgccaccaccagatgagaagttaagcagcctttctgtggagagtgagaataattgtgtacaaagtagagaagtatccaattatgtgacaacctttgtgtaataaaaatttgtttaaagttaataaa

SEQ ID NO: 258 - DNA, 2629 bp, Homo sapiens
  misc_feature: Incyte ID No: 1850092cB1
cgggcgctagccacctcccacccgcctcttggctcctctcctctaggccgtcgctttcgggttctctcatcgcttcgtcgttcgccaatgtttgaggagaaggccagcagtccttcagggaagatgggaggcgaggagaagccgattggtgctggtgaagagaagcaaaaggaaggaggcaaaaagaagaacaaagaaggatctggagatggaggtcgagctgagttgaatccttggcctgaatatatttacacacgtcttgagatgtataatatactaaaagcagaacatgattccattctggcagaaaaggcagaaaaagatagcaagccaattaaagtcactttgcctgatggtaaacaggttgatgcggaatcttggaaaactacaccatatcaaattgcctgtggaattagtcaaggcctggccgacaacaccgttattgctaaagtaaataatgttgtgtgggacctggaccgccctctggaagaagattgtaccttggagcttctcaagtttgaggatgaggaagctcaggcagtgtattggcactctagtgctcacataatgggtgaagccatggaaagagtctatggtggatgtttatgctacggtccgccaatagaaaatggattctattatgacatgtacctcgaagaagggggtgtgtctagcaatgatttctcttctctggaggctttgtgtaagaaaatcattaaagaaaaacaagcttttgaaagactggaagttaagaaagaaactttactggcaatgtttaagtacaacaagttcaaatgccggatattgaatgaaaaggtgaatactccaactaccacagtctatagatgtggccctttgatagatctctgccggggtcctcatgttagacacacgggcaaaattaaggctttaaaaatacacaaaaattcctccacgtactgggaaggcaaagcagatatggagactctccagagaatttatggcatttcattcccagatcctaaaatgttgaaagagtgggagaagttccaagaggaagctaaaaaccgagatcataggaaaattggcagggaccaagaactatatttctttcatgaactcagccctggaagttgcttttttctgccaaaaggagcctacatttataatgcacttattgaattcattaggagcgaatataggaaaagaggattccaggaggtagtcaccccaaacatcttcaacagccgactctggatgacctcgggccactggcagcactacagcgagaacatgttctcctttgaggtggagaaggagctgtttgccctgaaacccatgaactgcccaggacactgccttatgtttgatcatcggccaaggtcctggcgagaactgcctctgcggctagctgattttggggtacttcataggaacgagctgtctggagcactcacaggactcacccgggtacgaagattccaacaggatgatgctcacatattctgtgccatggagcagattgaagatgaaataaaaggttgtttggattttctacgtacggtatatagcgtatttggattttcttttaaactaaacctttctactcgcccggaaaaattccttggagatatcgaagtatgggatcaagctgagaaacaacttgaaaacagtctgaatgaatttggtgaaaagtgggagttaaactctggagatggagctttctatggcccaaagattgacatacagattaaagatgcgattgggcggtaccaccagtgtgcaaccatccagctggatttccagttgcccatcagatttaatcttacttatgtaagccatgatggtgatgataagaaaaggccagtgattgttcatcgagccatcttgggatcagtggaaagaatgattgctatcctcacagaaaactatgggggcaaatggcccttttggctgtcccctcgccaggtaatggtagttccagtgggaccaacctgtgatgaatatgcccaaaaggtacgacaacaattccacgatgccaaattcatggcagacattgatctggatccaggctgtacattgaataaaaagattcgaaatgcacagttagcacagtataacttcattttagttgttggtgaaaaagagaaaatcagtggcactgttaatatccgcacaagagacaataaggtccacggggaacgcaccatttctgaaactatcgagcggctacagcagctcaaagagttccgcagcaaacaggcagaagaagaattttaatgaaaaaattacccagattggctccatggaaaaggaggaacagcgtttccgtaaaattgactttgtactctgaaaacgtcaatttatattgaacttggaggagtttggcaaagtctgaataggtcaacctgcaggcgtaactatttttgacctagtcagtttttaaacaatgtgcatttgaaggagttaattaaaagagagccaataaaatgattttactcattcagtatctgagtactggaagtgaaacatgaggaatgctttagtgtaatgtgggagaacttttttgtaaatttaatgcaattgaaaaagttttcaaattcaattaagataactagaattggattatggtgtaaaaataaaaaaaaaa

SEQ ID NO: 259 - DNA, 3676 bp, Homo sapiens
  misc_feature: Incyte ID No: 1555752cB1
gtgggcttgaggtggccggtttgttagggagtcgtgtgcgtgccttggtcgcttctgtagctccgagggcaggttgcggaagaaagcccaggcggtctgtggcccagaggaaaggcctgcagcaggacgaggacctgagccaggaatgcaggatggcggcggtgaagaaggaagggggtgctctgagtgaagccatgtccctggagggagatgaatgggaactgagtaaagaaaatgtacaacctttaaggcaagggcggatcatgtccacgcttcagggagcactggcacaagaatctgcctgtaacaatactcttcagcagcagaaacgggcatttgaatatgaaattcgattttacactggaaatgaccctctggatgtttgggataggtatatcagctggacagagcagaactatcctcaaggtgggaaagagagtaatatgtcaacgttattagaaagagctgtagaagcactacaaggagaaaaacgatattatagtgatcctcgatttctcaatctctggcttaaattagggcgtttatgcaatgagcctttggatatgtacagttacttgcacaaccaagggattggtgtttcacttgctcagttctatatctcatgggcagaagaatatgaagctagagaaaactttaggaaagcagatgcgatatttcaggaagggattcaacagaaggctgaaccactagaaagactacagtcccagcaccgacaattccaagctcgagtgtctcggcaaactctgttggcacttgagaaagaagaagaggaggaagtttttgagtcttctgtaccacaacgaagcacactagctgaactaaagagcaaagggaaaaagacagcaagagctccaatcatccgtgtaggaggtgctctcaaggctccaagccagaacagaggactccaaaatccatttcctcaacagatgcaaaataatagtagaattactgtttttgatgaaaatgctgatgaggcttctacagcagagttgtctaagactacagtccagccatggatagcaccccccatgcccagggccaaagagaatgagctgcaagcaggcccttggaacacaggcaggtccttggaacacaggcctcgtggcaatacagcttcactgatagctgtacccgctgtgcttcccagtttcactccatatgtggaagagactgcacaacagccagttatgacaccatgtaaaattgaacctagtataaaccacatcctaagcaccagaaagcctggaaaggaagaaggagatcctctacaaagggttcagagccatcagcaagcgtctgaggagaagaaagagaagatgatgtattgtaaggagaagatttatgcaggagtaggggaattctcctttgaagaaattcgggctgaagttttccggaagaaattaaaagagcaaagggaagccgagctattgaccagtgcagagaagagagcagaaatgcagaaacagattgaagagatggagaagaagctaaaagaaatccaaactactcagcaagaaagaacaggtgatcagcaagaagagacgatgcctacaaaggagacaactaaactgcaaattgcttccgagtctcagaaaataccaggaatgactctatccagttctgtttgtcaagtaaactgttgtgccagagaaacttcacttgcggagaacatttggcaggaacaacctcattctaaaggtcccagtgtacctttctccatttttgatgagtttcttctttcagaaaagaagaataaaagtcctcctgcagatcccccacgagttttagctcaacgaagaccccttgcagttctcaaaacctcagaaagcatcacctcaaatgaagatgtgtctccagatgtttgtgatgaatttacaggaattgaacccttgagcgaggatgccattatcacaggcttcagaaatgtaacaatttgtcctaacccagaagacacttgtgactttgccagagcagctcgttttgtatccactccttttcatgagataatgtccttgaaggatctcccttctgatcctgagagactgttaccggaagaagatctagatgtaaagacctctgaggaccagcagacagcttgtggcactatctacagtcagactctcagcatcaagaagctgagcccaattattgaagacagtcgtgaagccacacactcctctggcttctctggttcttctgcctcggttgcaagcacctcctccatcaaatgtcttcaaattcctgagaaactagaacttactaatgagacttcagaaaaccctactcagtcaccatggtgttcacagtatcgcagacagctactgaagtccctaccagagttaagtgcctctgcagagttgtgtatagaagacagaccaatgcctaagttggaaattgagaaggaaattgaattaggtaatgaggattactgcattaaacgagaatacctaatatgtgaagattacaagttattctgggtggcgccaagaaactctgcagaattaacagtaataaaggtatcttctcaacctgtcccatgggacttttatatcaacctcaagttaaaggaacgtttaaatgaagattttgatcatttttgcagctgttatcaatatcaagatggctgtattgtttggcaccaatatataaactgcttcacccttcaggatcttctccaacacagtgaatatattacccatgaaataacagtgttgattatttataaccttttgacaatagtggagatgctacacaaagcagaaatagtccatggtgacttgagtccaaggtgtctgattctcagaaacagaatccacgatccctatgattgtaacaagaacaatcaagctttgaagatagtggacttttcctacagtgttgaccttagggtgcagctggatgtttttaccctcagcggctttcggactgtacagatcctggaaggacaaaagatcctggctaactgttcttctccctaccaggtagacctgtttggtatagcagatttagcacatttactattgttcaaggaacacctacaggtcttctgggatgggtccttctggaaacttagccaaaatatttctgagctaaaagatggtgaattgtggaataaattctttgtgcggattctgaatgccaatgatgaggccacagtgtctgttcttggggagcttgcagcagaaatgaatggggtttttgacactacattccaaagtcacctgaacaaagccttatggaaggtagggaagttaactagtcctggggctttgctctttcagtgagctaggcaatcaagtctcacagattgctgcctcagagcaatggttgtattgtggaacactgaaactgtatgtgctgtaatttaatttaggacacatttagatgcactaccattgctgttctactttttggtacaggtatattttgacgtcactgatattttttatacagtgatatacttactcatggccttgtctaacttttgtgaagaactattttattctaaacagactcattacaaatggttaccttgttatttaacccatttgtctctacttttccctgtacttttcccatttgtaatttgtaaaatgttctcttatgatcaccatgtattttgtaaataataaaatagtatctgttaaaaaaaaaa

SEQ ID NO: 260 - DNA, 8491 bp, Homo sapiens
  misc_feature: Incyte ID No: 441283.5
taaatttaaaggcggggcggcctgtgagccctgaagtgccggccgcggagggtcctggccattttggtgggaccagttcagcctgataggatggcggaggaaggagccgtggccgtctgcgtgcgagtgcggccgctgaacagcagagaagaatcacttggagaaactgcccaagtttactggaaaactgacaataatgtcatttatcaagttgatggaagtaaatccttcaattttgatcgtgtctttcatggtaatgaaactaccaaaaatgtgtatgaagaaatagcagcaccaatcatcgattctgccatacaaggctacaatggtactatatttgcctatggacagactgcttcaggaaaaacatataccatgatgggttcagaagatcatttgggagttatacccagggcaattcatgacattttccaaaaaattaagaagtttcctgatagggaatttctcttacgtgtatcttacatggaaatatacaatgaaaccattacagatttactctgtggcactcaaaaaatgaaacctttaattattcgagaagatgtcaataggaatgtgtatgttgctgatctcacagaagaagttgtatatacatcagaaatggctttgaaatggattacaaagggagaaaagagcaggcattatggagaaacaaaaatgaatcaaagaagcagtcgttctcataccatctttaggatgattttggaaagcagagagaagggtgaaccttctaattgtgaaggatctgttaaggtatcccatttgaatttggttgatcttgcaggcagtgaaagagctgctcaaacaggcgctgcaggtgtgcggctcaaggaaggctgtaatataaatcgaagcttatttattttgggacaagtgatcaagaaacttagtgatggacaagttggtggtttcataaattatcgagatagcaagttaacacgaattcttcagaattccttgggaggaaatccaaagacacgtattatctgcacaattactccagtatcttttgatgaaactcttactgctctccagtttgccagtactgctaaatatatgaagaatactccttatgttaatgaggtatcaactgatgaagctctcctgaaaaggtatagaaaagaaataatggatcttaaaaaacaattagaggaggtttctttagagacgcgggctcaggcaatggaaaaagaccaattggcccaacttttggaagaaaaagatttgcttcagaaagtacagaatgagaaaattgaaaacttaacacggatgctggtgacctcttcttccctcacgttgcaacaggaattaaaggctaaaagaaaacgaagagttacttggtgccttggcaaaattaacaaaatgaagaactcaaactatgcagatcaatttaatataccaacaaatataacaacaaaaacacataagctttctataaatttattacgagaaattgatgaatctgtctgttcagagtctgatgttttcagtaacactcttgatacattaagtgagatagaatggaatccagcaacaaagctactaaatcaggagaatatagaaagtgagttgaactcacttcgtgctgactatgataatctggtattagactatgaacaactacgaacagaaaaagaagaaatggaattgaaattaaaagaaaagaatgatttggatgaatttgaggctctagaaagaaaaactaaaaaagatcaagagatgcaactaattcatgaaatttcgaacttaaagaatttagttaagcatcgagaagtatataatcaagatcttgagaatgaactcagttcaaaagtagagctgcttagagaaaaggaagaccagattaagaagctacaggaatacatagactctcaaaagctagaaaatataaaaatggacttgtcatactcattggaaagcattgaagacccaaaacaaatgaagcagactctgtttgatgctgaaactgtagcccttgatgccaagagagaatcagcctttcttagaagtgaaaatctggagttgaaggagaaaatgaaagaacttgcaactacatacaagcaaatggaaaatgatattcagttatatcaaagccaattggaggcaaaaaagaaaatgcaagttgatctggagaaagaattacaatctgcttttaatgagataacaaaactcacctcccttatagatggcaaagttccaaaagatttgctctgtaatttggaattggaaggaaagattactgatcttcagaaagaactaaataaagaagttgaagaaaatgaagctttgcgggaagaagtcattttgctttcagaattgaaatctttaccttctgaagtagaaaggctgaggaaagagatacaagacaaatctgaagagctccatataataacatcagaaaaagataaattgttttctgaagtagttcataaggagagtagagttcaaggtttacttgaagaaattgggaaaacaaaagatgacctagcaactacacagtcgaattataaaagcactgatcaagaattccaaaatttcaaaacccttcatatggactttgagcaaaagtataagatggtccttgaggagaatgagagaatgaatcaggaaatagttaatctctctaaagaagcccaaaaatttgattcgagtttgggtgctttgaagaccgagctttcttacaagacccaagaacttcaggagaaaacacgtgaggttcaagaaagactaaatgagatggaacagctgaaggaacaattagaaaatagagattctccgctgcaaactgtagaaagggagaaaacactgattactgagaaactgcagcaaactttagaagaagtaaaaactttaactcaagaaaaagatgatctaaaacaactccaagaaagcttgcaaattgagagggaccaactcaaaagtgatattcacgatactgttaacatgaatatagatactcaagaacaattacgaaatgctcttgagtctctgaaacaacatcaagaaacaattaatacactaaaatcgaaaatttctgaggaagtttccaggaatttgcatatggaggaaaatacaggagaaactaaagatgaatttcagcaaaagatggttggcatagataaaaaacaggatttggaagctaaaaatacccaaacactaactgcagatgttaaggataatgagataattgagcaacaaaggaagatattttctttaatacaggagaaaaatgaactccaacaaatgttagagagtgttatagcagaaaaggaacaattgaagactgacctaaaggaaaatattgaaatgaccattgaaaaccaggaagaattaagacttcttggggatgaacttaaaaagcaacaagagatagttgcacaagaaaagaaccatgccataaagaaagaaggagagctttctaggacctgtgacagactggcagaagttgaagaaaaactaaaggaaaagagccagcaactccaagaaaaacagcaacaacttcttaatgtacaagaagagatgagtgagatgcagaaaaagattaatgaaatagagaatttaaagaatgaattaaagaacaaagaattgacattggaacatatggaaacagagaggcttgagttggctcagaaacttaatgaaaattatgaggaagtgaaatctataaccaaagaaagaaaagttctaaaggaattacagaagtcatttgaaacagagagagaccaccttagaggatatataagagaaattgaagctacaggcctacaaaccaaagaagaactaaaaattgctcatattcacctaaaagaacaccaagaaactattgatgaactaagaagaagcgtatctgagaagacagctcaaataataaatactcaggacttagaaaaatcccataccaaattacaagaagagatcccagtgcttcatgaggaacaagagttactgcctaatgtgaaaaaagtcagtgagactcaggaaacaatgaatgaactggagttattaacagaacagtccacaaccaaggactcaacaacactggcaagaatagaaatggaaaggctcaggttgaatgaaaaatttcaagaaagtcaggaagagataaaatctctaaccaaggaaagagacaaccttaaaacgataaaagaagcccttgaagttaaacatgaccagctgaaagaacatattagagaaactttggctaaaatccaggagtctcaaagcaaacaagaacagtccttaaatatgaaagaaaaagacaatgaaactaccaaaatcgtgagtgagatggagcaattcaaacccaaagattcagcactactaaggatagaaatagaaatgctcggattgtccaaaagacttcaagaaagtcatgatgaaatgaaatctgtagctaaggagaaagatgacctacagaggctgcaagaagttcttcaatctgaaagtgaccagctcaaagaaaacataaaagaaattgtagctaaacacctggaaactgaagaggaacttaaagttgctcattgttgcctgaaagaacaagaggaaactattaatgagttaagagtgaatctttcagagaaggaaactgaaatatcaaccattcaaaagcagttagaagcaatcaatgataaattacagaacaagatccaagagatttatgagaaagaggaacaatttaatataaaacaaattagtgaggttcaggaaaacgtgaatgaactgaaacaattcaaggagcatcgcaaagccaaggattcagcactacaaagtatagaaagtaagatgctcgagttgaccaacagacttcaagaaagtcaagaagaaatacaaattatgattaaggaaaaagaggaaatgaaaagagtacaggaggcccttcagatagagagagaccaactgaaagaaaacactaaagaaattgtagctaaaatgaaagaatctcaagaaaaagaatatcagtttcttaagatgacagctgtcaatgagactcaggagaaaatgtgtgaaatagaacacttgaaggagcaatttgagacccagaagttaaacctggaaaacatagaaacggagaatataaggttgactcagatactacatgaaaaccttgaagaaatgagatctgtaacaaaagaaagagatgaccttaggagtgtggaggagactctcaaagtagagagagaccagctcaaggaaaaccttagagaaactataactagagacctagaaaaacaagaggagctaaaaattgttcacatgcatctgaaggagcaccaagaaactattgataaactaagagggattgtttcagagaaaacaaatgaaatatcaaatatgcaaaaggacttagaacactcaaatgatgccttaaaagcacaggatctgaaaatacaagaggaactaagaattgctcacatgcatctgaaagagcagcaggaaactattgacaaactcagaggaattgtttctgagaagacagataaactatcaaatatgcaaaaagatttagaaaattcaaatgctaaattacaagaaaagattcaagaacttaaggcaaatgaacatcaacttattacgttaaaaaaagatgtcaatgagacacagaaaaaagtgtctgaaatggagcaactaaagaaacaaataaaagaccaaagcttaactctgagtaaattagaaatagagaatttaaatttggctcaagaacttcatgaaaaccttgaagaaatgaaatctgtaatgaaagaaagagataatctaagaagagtagaggagacactcaaactggagagagaccaactcaaggaaagcctgcaagaaaccaaagctagagatctggaaatacaacaggaactaaaaactgctcgtatgctatcaaaagaacacaaagaaactgttgataaacttagagaaaaaatttcagaaaagacaattcaaatttcagacattcaaaaggatttagataaatcaaaagatgaattacagaaaaagatccaagaacttcagaaaaaagaacttcaactgcttagagtgaaagaagatgtcaatatgagtcataaaaaaattaatgaaatggaacagttgaagaagcaatttgagccaaactatctatgcaagtgtgagatggataacttccagttgactaagaaacttcatgaaagccttgaagaaataagaattgtagctaaagaaagagatgagctaaggaggataaaagaatctctcaaaatggaaagggaccaattcatagcaaccttaagggaaatgatagctagagaccgacagaaccaccaagtaaaacctgaaaaaaggttactaagtgatggacaacagcaccttatggaaagcctgagagaaaagtgctctagaataaaagagcttttgaagagatactcagagatggatgatcattatgagtgcttgaatagattgtctcttgacttggagaaggaaattgaattccacagaatcatgaagaaactgaagtatgtgttaagctatgttacaaaaataaaagaagaacaacatgaatgcatcaataaatttgaaatggattttattgatgaagtggaaaagcaaaaggaattgctaattaaaatacagcaccttcaacaagattgtgatgtaccatccagagaattaagggatctcaaattgaaccagaatatggatctacatattgaggaaattctcaaagatttctcagaaagtgagttccctagcataaagactgaatttcaacaagtactaagtaataggaaagaaatgacacagtttttggaagagtggttaaatactcgttttgatatagaaaagcttaaaaatggcatccagaaagaaaatgataggatttgtcaagtgaataacttctttaataacagaataattgccataatgaatgaatcaacagagtttgaggaaagaagtgctaccatatccaaagagtgggaacaggacctgaaatcactgaaagagaaaaatgaaaaactatttaaaaactaccaaacattgaagacttccttggcatctggtgcccaggttaatcctaccacacaagacaataagaatcctcatgttacatcaagagctacacagttaaccacagagaaaattcgagagctggaaaattcactgcatgaagctaaagaaagtgctatgcataaggaaagcaagattataaagatgcagaaagaacttgaggtgactaatgacataatagcaaaacttcaagccaaagttcatgaatcaaataaatgccttgaaaaaacaaaagagacaattcaagtacttcaggacaaagttgctttaggagctaagccatataaagaagaaattgaagatctcaaaatgaagcttgtgaaaatagacctagagaaaatgaaaaatgccaaagaatttgaaaaggaaatcagtgctacaaaagccactgtagaatatcaaaaggaagttataaggctattgagagaaaatctcagaagaagtcaacaggcccaagatacctcagtgatatcagaacatactgatcctcagccttcaaataaacccttaacttgtggaggtggcagcggcattgtacaaaacacaaaagctcttattttgaaaagtgaacatataaggctagaaaaagaaatttctaagttaaagcagcaaaatgaacagctaataaaacaaaagaatgaattgttaagcaataatcagcatctttccaatgaggtcaaaacttggaaggaaagaacccttaaaagagaggctcacaaacaagtaacttgtgagaattctccaaagtctcctaaagtgactggaacagcttctaaaaagaaacaaattacaccctctcaatgcaaggaacggaatttacaagatcctgtgccaaaggaatcaccaaaatcttgtttttttgatagccgatcaaagtctttaccatcacctcatccagttcgctattttgataactcaagtttaggcctttgtccagaggtgcaaaatgcaggagcagagagtgtggattctcagccaggtccttggcacgcctcctcaggcaaggatgtgcctgagtgcaaaactcagtagactcctctttgtcacttctctggagatccagcattccttatttggaaatgactttgtttatgtgtctatccctggtaatgatgttgtagtgcagcttaatttcaattcagtctttactttgccactagagttgaaagataagggaacaggaaatgaatgcattgtggtaatttagaatggtgatagcaataccttcttcttgcatatggtaatacttttaaaagttgaattgttttatttatttgtatattttgtaaagaataaagttattgaaagaaatgtaaagttatctacatgacttagcatattccaaagcataatacatacattaatataaaacatcattttattaacaaaattgtaaatgtttttaataccttacacattcaataaatgtttagtagttctg

SEQ ID NO: 261 - DNA, 1097 bp, Homo sapiens
  misc_feature: Incyte ID No: 4349106cB1
gcggcttccgggatttggcggtggcctttgttggctgcagtaagagctcagtctcttcaccaggggctcccagtccttccatctgggaggccaaggcggcttcgcgttctgagaatagacagaacctctgttactctgtgaccggcaggcaccgggagatccgtagctcagacgccaggacatcccggaagctgggaaatgggactgttgacattcagggatgtggccatagaattctctcgggaggagtgggaacacctggactcagatcagaagcttttatatggggatgtgatgttagagaactacggaaacctggtctctctgggtctcgctgtctctaagccggacctgatcacctttttggagcaaaggaaagagccctggaatgtgaagagtgcagagacagtagccatccagccagatatcttttctcatgatactcaaggcctcttaagaaagaagcttatagaagcatcattccaaaaagtgatattggatggatatgggagctgtggccctcagaatttaaacttaaggaaagagtgggaaagtgagggcaaaataatcctatggtgaaaaaaaatcaacaagataatctctgcatgagaaaaaggaccaaagacaagtgaattttctgagggtgatgaaagtgttgcttcgaaaaggggtgaagtttatatgggtctatttatttgtctaacatgtacagttaaggtttatgccttgcaatgtatgtacatcttcacaaaaaaaatcttaaaaaaattaaatgggtgggggtagggaaagggttgaagtatagatgaagcagaagtggtacatgattagtagttgaagctgggggcaggtctatatattttatttttatgtctttaatagcatttgtataaatgtacaatattcgtttacaatgttagctcaggatcttgtttacctttggacagggagggagggagaaatttattttctgggtaggagtaaagctggttctattcctcagttatgtaaattatctgttataatccaaaaagctttacatgaatgtttctgtatgtaatgtggtatatcaataaaaaattaaatattaaaaaaaa

SEQ ID NO: 262 - DNA, 10432 bp, Homo sapiens
  misc_feature: Incyte ID No: 2700132cB1
tggttcgacaagtggccttgcgggccggatcgtcccagtggaagagttgtaaatttgcttctggccttcccctacggattatacctggccttcccctacggattatactcaacttactgtttagaaaatgtggcccacgagacgcctggttactatcaaaaggagcggggtcgacggtccccactttcccctgagcctcagcacctgcttgtttggaaggggtattgaatgtgacatccgtatccagcttcctgttgtgtcaaaacaacattgcaaaattgaaatccatgagcaggaggcaatattacataatttcagttccacaaatccaacacaagtaaatgggtctgttattgatgagcctgtacggctaaaacatggagatgtaataactattattgatcgttccttcaggtatgaaaatgaaagtcttcagagtggaaggaagtcaactgaatttccaagaaaaatacgtgaacaggagccagcacgtcgtgtctcaagatctagcttctcttctgaccctgatgagaaagctcaagattccaaggcctattcaaaaatcactgaaggaaaagtttcaggaaatcctcaggtacatatcaagaatgtcaaagaagacagtaccgcagatgactcaaaagacagtgttgctcagggaacaactaatgttcattcctcagaacatgctggacgtaatggcagaaatgcagctgatcccatttctggggattttaaagaaatttccagcgttaaattagtgagccgttatggagaattgaagtctgttcccactacacaatgtcttgacaatagcaaaaaaaatgaatctcccttttggaagctttatgagtcagtgaagaaagagttggatgtaaaatcacaaaaagaaaatgtcctacagtattgtagaaaatctggattacaaactgattacgcaacagagaaagaaagtgctgatggtttacagggggagacccaactgttggtctcgcgtaagtcaagaccaaaatctggtgggagcggccacgctgtggcagagcctgcttcacctgaacaagagcttgaccagaacaaggggaagggaagagacgtggagtctgttcagactcccagcaaggctgtgggcgccagctttcctctctatgagccggctaaaatgaagacccctgtacaatattcacagcaacaaaattctccacaaaaacataagaacaaagacctgtatactactggtagaagagaatctgtgaatctgggtaaaagtgaaggcttcaaggctggtgataaaactcttactcccaggaagctttcaactagaaatcgaacaccagctaaagttgaagatgcagctgactctgccactaagccagaaaatctctcttccaaaaccagaggaagtattcctacagatgtggaagttctgcctacggaaactgaaattcacaatgagccatttttaactctgtggctcactcaagttgagaggaagatccaaaaggattccctcagcaagcctgagaaattgggcactacagctggacagatgtgctctgggttacctggtcttagttcagttgatatcaacaactttggtgattccattaatgagagtgagggaatacctttgaaaagaaggcgtgtgtcctttggtgggcacctaagacctgaactatttgatgaaaacttgcctcctaatacgcctctcaaaaggggagaagccccaaccaaaagaaagtctctggtaatgcacactccacctgtcctgaagaaaatcatcaaggaacagcctcaaccatcaggaaaacaagagtcaggttcagaaatccatgtggaagtgaaggcacaaagcttggttataagccctccagctcctagtcctaggaaaactccagttgccagtgatcaacgccgtaggtcctgcaaaacagcccctgcttccagcagcaaatctcagacagaggttcctaagagaggaggagaaagagtggcaacctgccttcaaaagagagtgtctatcagccgaagtcaacatgatattttacagatgatatgttccaaaagaagaagtggtgcttcggaagcaaatctgattgttgcaaaatcatgggcagatgtagtaaaacttggtgcaaaacaaacacaaactaaagtcataaaacatggtcctcaaaggtcaatgaacaaaaggcaaagaagacctgctactccaaagaagcctgtgggcgaagttcacagtcaatttagtacaggccacgcaaactctccttgtaccataataatagggaaagctcatactgaaaaagtacatgtgcctgctcgaccctacagagtgctcaacaacttcatttccaaccaaaaaatggactttaaggaagatctttcaggaatagctgaaatgttcaagaccccagtgaaggagcaaccgcagttgacaagcacatgtcacatcgctatttcaaattcagagaatttgcttggaaaacagtttcaaggaactgattcaggagaagaacctctgctccccacctcagagagttttggaggaaatgtgttcttcagtgcacagaatgcagcaaaacagccatctgataaatgctctgcaagccctcccttaagacggcagtgtattagagaaaatggaaacgtagcaaaaacgcccaggaacacctacaaaatgacttctctggagacaaaaacttcagatactgagacagagccttcaaaaacagtatccactgtaaacaggtcaggaaggtctacagagttcaggaatatacagaagctacctgtggaaagtaagagtgaagaaacaaatacagaaattgttgagtgcatcctaaaaagaggtcagaaggcaacactactacaacaaaggagagaaggagagatgaaggaaatagaaagaccttttgagacatataaggaaaatattgaattaaaagaaaacgatgaaaagatgaaagcaatgaagagatcaagaacttgggggcagaaatgtgcaccaatgtctgacctgacagacctcaagagcttgcctgatacagaactcatgaaagacacggcacgtggccagaatctcctccaaacccaagatcatgccaaggcaccaaagagtgagaaaggcaaaatcactaaaatgccctgccagtcattacaaccagaaccaataaacaccccaacacacacaaaacaacagttgaaggcatccctggggaaagtaggtgtgaaagaagagctcctagcagtcggcaagttcacacggacgtcaggggagaccacgcacacgcacagagagccagcaggagatggcaagagcatcagaacgtttaaggagtctccaaagcagatcctggacccagcagcccgtgtaactggaatgaagaagtggccaagaacgcctaaggaagaggcccagtcactagaagacctggctggcttcaaagagctcttccagacaccaggtccctctgaggaatcaatgactgatgagaaaactaccaaaatagcctgcaaatctccaccaccagaatcagtggacactccaacaagcacaaagcaatggcctaagagaagtctcaggaaagcagatgtagaggaagaattcttagcactcaggaaactaacaccatcagcagggaaagccatgcttacgcccaaaccagcaggaggtgatgagaaagacattaaagcatttatgggaactccagtgcagaaactggacctggcaggaactttacctggcagcaaaagacagctacagactcctaaggaaaaggcccaggctctagaagacctggctggctttaaagagctcttccagactcctggtcacaccgaggaattagtggctgctggtaaaaccactaaaataccctgcgactctccacagtcagacccagtggacaccccaacaagcacaaagcaacgacccaagagaagtatcaggaaagcagatgtagagggagaactcttagcgtgcaggaatctaatgccatcagcaggcaaagccatgcacacgcctaaaccatcagtaggtgaagagaaagacatcatcatatttgtgggaactccagtgcagaaactggacctgacagagaacttaaccggcagcaagagacggccacaaactcctaaggaagaggcccaggctctggaagacctgactggctttaaagagctcttccagacccctggtcatactgaagaagcagtggctgctggcaaaactactaaaatgccctgcgaatcttctccaccagaatcagcagacaccccaacaagcacaagaaggcagcccaagacacctttggagaaaagggacgtacagaaggagctctcagccctgaagaagctcacacagacatcaggggaaaccacacacacagataaagtaccaggaggtgaggataaaagcatcaacgcgtttagggaaactgcaaaacagaaactggacccagcagcaagtgtaactggtagcaagaggcacccaaaaactaaggaaaaggcccaacccctagaagacctggctggctggaaagagctcttccagacaccagtatgcactgacaagcccacgactcacgagaaaactaccaaaatagcctgcagatcacaaccagacccagtggacacaccaacaagctccaagccacagtccaagagaagtctcaggaaagtggacgtagaagaagaattcttcgcactcaggaaacgaacaccatcagcaggcaaagccatgcacacacccaaaccagcagtaagtggtgagaaaaacatctacgcatttatgggaactccagtgcagaaactggacctgacagagaacttaactggcagcaagagacggctacaaactcctaaggaaaaggcccaggctctagaagacctggctggctttaaagagctcttccagacacgaggtcacactgaggaatcaatgactaacgataaaactgccaaagtagcctgcaaatcttcacaaccagacctagacaaaaacccagcaagctccaagcgacggctcaagacatccctggggaaagtgggcgtgaaagaagagctcctagcagttggcaagctcacacagacatcaggagagactacacacacacacacagagccaacaggagatggtaagagcatgaaagcatttatggagtctccaaagcagatcttagactcagcagcaagtctaactggcagcaagaggcagctgagaactcctaagggaaagtctgaagtccctgaagacctggccggcttcatcgagctcttccagacaccaagtcacactaaggaatcaatgactaatgaaaaaactaccaaagtatcctacagagcttcacagccagacctagtggacaccccaacaagctccaagccacagcccaagagaagtctcaggaaagcagacactgaagaagaatttttagcatttaggaaacaaacgccatcagcaggcaaagccatgcacacacccaaaccagcagtaggtgaagagaaagacatcaacacgtttttgggaactccagtgcagaaactggaccagccaggaaatttacctggcagcaatagacggctacaaactcgtaaggaaaaggcccaggctctagaagaactgactggcttcagagagcttttccagacaccatgcactgataaccccacgactgatgagaaaactaccaaaaaaatactctgcaaatctccgcaatcagacccagcggacaccccaacaaacacaaagcaacggcccaagagaagcctcaagaaagcagacgtagaggaagaatttttagcattcaggaaactaacaccatcagcaggcaaagccatgcacacgcctaaagcagcagtaggtgaagagaaagacatcaacacatttgtggggactccagtggagaaactggacctgctaggaaatttacctggcagcaagagacggccacaaactcctaaagaaaaggccaaggctctagaagatctggctggcttcaaagagctcttccagacaccaggtcacactgaggaatcaatgaccgatgacaaaatcacagaagtatcctgcaaatctccacaaccagacccagtcaaaaccccaacaagctccaagcaacgactcaagatatccttggggaaagtaggtgtgaaagaagaggtcctaccagtcggcaagctcacacagacgtcagggaagaccacacagacacacagagagacagcaggagatggaaagagcatcaaagcgtttaaggaatctgcaaagcagatgctggacccagcaaactatggaactgggatggagaggtggccaagaacacctaaggaagaggcccaatcactagaagacctggccggcttcaaagagctcttccagacaccagaccacactgaggaatcaacaactgatgacaaaactaccaaaatagcctgcaaatctccaccaccagaatcaatggacactccaacaagcacaaggaggcggcccaaaacacctttggggaaaagggatatagtggaagagctctcagccctgaagcagctcacacagaccacacacacagacaaagtaccaggagatgaggataaaggcatcaacgtgttcagggaaactgcaaaacagaaactggacccagcagcaagtgtaactggtagcaagaggcagccaagaactcctaagggaaaagcccaacccctagaagacttggctggcttgaaagagctcttccagacaccaatatgcactgacaagcccacgactcatgagaaaactaccaaaatagcctgcagatctccacaaccagacccagtgggtaccccaacaatcttcaagccacagtccaagagaagtctcaggaaagcagacgtagaggaagaatccttagcactcaggaaacgaacaccatcagtagggaaagctatggacacacccaaaccagcaggaggtgatgagaaagacatgaaagcatttatgggaactccagtgcagaaattggacctgccaggaaatttacctggcagcaaaagatggccacaaactcctaaggaaaaggcccaggctctagaagacctggctggcttcaaagagctcttccagacaccaggcactgacaagcccacgactgatgagaaaactaccaaaatagcctgcaaatctccacaaccagacccagtggacaccccagcaagcacaaagcaacggcccaagagaaacctcaggaaagcagacgtagaggaagaatttttagcactcaggaaacgaacaccatcagcaggcaaagccatggacacaccaaaaccagcagtaagtgatgagaaaaatatcaacacatttgtggaaactccagtgcagaaactggacctgctaggaaatttacctggcagcaagagacagccacagactcctaaggaaaaggctgaggctctagaggacctggttggcttcaaagaactcttccagacaccaggtcacactgaggaatcaatgactgatgacaaaatcacagaagtatcctgtaaatctccacagccagagtcattcaaaacctcaagaagctccaagcaaaggctcaagatacccctggtgaaagtggacatgaaagaagagcccctagcagtcagcaagctcacacggacatcaggggagactacgcaaacacacacagagccaacaggagatagtaagagcatcaaagcgtttaaggagtctccaaagcagatcctggacccagcagcaagtgtaactggtagcaggaggcagctgagaactcgtaaggaaaaggcccgtgctctagaagacctggttgacttcaaagagctcttctcagcaccaggtcacactgaagagtcaatgactattgacaaaaacacaaaaattccctgcaaatctcccccaccagaactaacagacactgccacgagcacaaagagatgccccaagacacgtctcaggaaagaagtaaaagaggagctctcagcagttgagaggctcacgcaaacatcagggcaaagcacacacacacacaaagaaccagcaagcggtgatgagggcatcaaagtattgaagcaacgtgcaaagaagaaaccaaacccagtagaagaggaacccagcaggagaaggccaagagcacctaaggaaaaggcccaacccctggaagacctggccggcttcacagagctctctgaaacatcaggtcacactcaggaatcactgactgctggcaaagccactaaaataccctgcgaatctcccccactagaagtggtagacaccacagcaagcacaaagaggcatctcaggacacgtgtgcagaaggtacaagtaaaagaagagccttcagcagtcaagttcacacaaacatcaggggaaaccacggatgcagacaaagaaccagcaggtgaagataaaggcatcaaagcattgaaggaatctgcaaaacagacaccggctccagcagcaagtgtaactggcagcaggagacggccaagagcacccagggaaagtgcccaagccatagaagacctagctggcttcaaagacccagcagcaggtcacactgaagaatcaatgactgatgacaaaaccactaaaataccctgcaaatcatcaccagaactagaagacaccgcaacaagctcaaagagacggcccaggacacgtgcccagaaagtagaagtgaaggaggagctgttagcagttggcaagctcacacaaacctcaggggagaccacgcacaccgacaaagagccggtaggtgagggcaaaggcacgaaagcatttaagcaacctgcaaagcggaagctggacgcagaagatgtaattggcagcaggagacagccaagagcacctaaggaaaaggcccaacccctggaagatctggccagcttccaagagctctctcaaacaccaggccacactgaggaactggcaaatggtgctgctgatagctttacaagcgctccaaagcaaacacctgacagtggaaaacctctaaaaatatccagaagagttcttcgggcccctaaagtagaacccgtgggagacgtggtaagcaccagagaccctgtaaaatcacaaagcaaaagcaacacttccctgcccccactgcccttcaagaggggaggtggcaaagatggaagcgtcacgggaaccaagaggctgcgctgcatgccagcaccagaggaaattgtggaggagctgccagccagcaagaagcagagggttgctcccagggcaagaggcaaatcatccgaacccgtggtcatcatgaagagaagtttgaggacttctgcaaaaagaattgaacctgcggaagagctgaacagcaacgacatgaaaaccaacaaagaggaacacaaattacaagactcagtccctgaaaataagggaatatccctgcgctccagacgccaaaataagactgaggcagaacagcaaataactgaggtctttgtattagcagaaagaatagaaataaacagaaatgaaaagaagcccatgaagacctccccagagatggacattcagaatccagatgatggagcccggaaacccatacctagagacaaagtcactgagaacaaaaggtgcttgaggtctgctagacagaatgagagctcccagcctaaggtggcagaggagagcggagggcagaagagtgcgaaggttctcatgcagaatcagaaagggaaaggagaagcaggaaattcagactccatgtgcctgagatcaagaaagacaaaaagccagcctgcagcaagcactttggagagcaaatctgtgcagagagtaacgcggagtgtcaagaggtgtgcagaaaatccaaagaaggctgaggacaatgtgtgtgtcaagaaaataagaaccagaagtcatagggacagtgaagatatttgacagaaaaatcgaactgggaaaaatataataaagttagttttgtgataagttctagtgcagtttttgtcataaattacaagtgaattctgtaagtaaggctgtcagtctgcttaagggaagaaaactttggatttgctgggtctgaatcggcttcataaactccactgggagcactgctgggctcctggactgagaatagttgaacaccgggggctttgtgaaggagtctgggccaaggtttgccctcagctttgcagaatgaagccttgaggtctgtcaccacccacagccaccctacagcagccttaactgtgacacttgccacactgtgtcgtcgtttgtttgcctatgtcctccagggcacggtggcaggaacaactatcctcgtctgtcccaacactgagcaggcactcggtaaacacgaatgaatggatgagcgcacggatgaatggagcttacagatctgtctttccaatggccggggggatttggtccccaaattaaggctattggacatctgcacaggacagtcta

SEQ ID NO: 263 - DNA, 1726 bp, Homo sapiens
  misc_feature: Incyte ID No: 441283.4
aaaatttcaagaaagtcaggaagagataaaatctctaaccaaggaaagagacaaccttaaaacgataaaagaaaccctgaagttaaacatgaccagctgaaagaacatattagagaaacttggctaaaatccaggagtctcaaagcaaacaagaacagtccttaaatatgaaagaaaaagacaatgaaactaccaaaatcgtgagtgagatggagcaattcaaacccaaagattcagcactactaaggatagaaatagaaatgctcggattgtccaaaagacttcaagaaagtcatgatgaaatgaaatctgtagctaaggagaaagatgacctacagaggctgcaagaagttcttcaatctgaaagtgaccagctcaaagaaaacataaaagaaattgtagctaaacacctggaaactgaagaggaacttaaagttgctcattgttgcctgaaagaacaagaggaaactattaatgagttaagagtgaatctttcagagaaggaaactgaaatatcaaccattcaaaagcagttagaagcaatcaatgataaattacagaacaagatccaagagatttatgagaaagaggaacaatttaatataaaacaaattagtgaggttcaggaaaaagtgaatgaactgaaacaattcaaggagcatcgcaaagccaaggattcagcactacaaagtatagaaagtaagatgctcgagttgaccaacagacttcaagaaagtcaagaagaaatacaaattatgattaaggaaaaagaggaaatgaaaagagtacaggaggcccttcagatagagagagaccaactgaaagaaaacactaaagaaattgtagctaaaatgaaagaatctcaagaaaaagaatatcagtttcttaagatgacagctgtcaatgagactcaggagaaaatgtgtgaaatagaacacttgaaggagcaatttgagacccagaagttaaacctggaaaacatagaaacggagaatataaggttgactcagatactacatgaaaaccttgaagaaatgagatctgtaacaaaagaaagagatgaccttaggagtgtggaggagactctcaaagtagagagagaccagctcaaggaaaaccttagagaaactataactagagacctagaaaaacaagaggagctaaaaattgttcacatgcatctgaaggagcaccaagaaactattgacaaactcagaggaattgtttctgagaagacagataaactatcaaatatgcaaaaagatttagaaaattcaaatgctaaattacaagaaaagattcaagaacttaaggcaaatgaacatcaacttattacgttaaaaaaagatgtcaatgagacacagaaaaaagtgtctgaaatggagcaactaaagaaacaaataaaagaccaaagcttaactctgagtaaattagaaatagagaatttaaatttggctcagaaacttcatgaaaaccttgaagaaatgaaatctgtaatgaaagaaagagataatctaagaagagtagaggagacactcaaactggagagagaccaactcaaggaaagcctgcaagaaaccaaagctagagatctggaaatacaacaggaactaaaaactgctcgtatgctatcaaaagaacacaaagaaactgttgataaacttagagaaaaaatttcagaaaagacaattcaaatttcagacattcaaaaggatttagataaatc

SEQ ID NO: 264 - DNA, 2053 bp, Homo sapiens
  misc_feature: Incyte ID No: 2613976cB1
ttttgggccctcccgagaaagggaagtgcattctcgcttccgtagcggtctccgccggttgggggaaagtaattccggctgttgcaccatggcgtccatggggaccctcgccttcgatgaatatgggcgccctttcctcatcatcaaggatcaggaccgcaagtcccgtcttatgggacttgaggccctcaagtctcatataatggcagcaaaggctgtagcaaatacaatgagaacatcacttggaccaaatgggcttgataagatgatggtggataaggatggagatgtgactgtaactaatgatggggccaccatcttaagcatgatggatgttgatcatcagattgccaagctgatggtggaactgtccaagtctcaggatgatgaaattggagatggaaccacaggagtggttgtcctggctggtgccttgttagaagaagcggagcaattgctagaccgaggcattcacccaatcagaatagccgatggctatgagcaggctgctcgtgttgctattgaacacctggacaagatcagcgatagcgtccttgttgacataaaggacaccgaacccctgattcagacagcaaaaaccacgctgggctccaaagtggtcaacagttgtcaccgacagatggctgagattgctgtgaatgccgtcctcactgtagcagatatggagcggagagacgttgactttgagcttatcaaagtagaaggcaaagtgggcggcaggctggaggacactaaactgattaagggcgtgattgtggacaaggatttcagtcacccacagatgccaaaaaaagtggaagatgcgaagattgcaattctcacatgtccatttgaaccacccaaaccaaaaacaaagcataagctggatgtgacctctgtcgaagattataaagcccttcagaaatacgaaaaggagaaatttgaagagatgattcaacaaattaaagagactggtgctaacctagcaatttgtcagtggggctttgatgatgaagcaaatcacttacttcttcagaacaacttgcctgcggttcgctgggtaggaggacctgaaattgagctgattgccatcgcaacaggagggcggatcgtccccaggttctcagagctcacagccgagaagctgggctttgctggtcttgtacaggagatctcatttgggacaactaaggataaaatgctggtcatcgagcagtgtaagaactccagagctgtaaccatttttattagaggaggaaataagatgatcattgaggaggcgaaacgatcccttcacgatgctttgtgtgtcatccggaacctcatccgcgataatcgtgtggtgtatggaggaggggctgctgagatatcctgtgccctggcagttagccaagaggcggataagtgccccaccttagaacagtatgccatgagagcgtttgccgacgcactggaggtcatccccatggccctctctgaaaacagtggcatgaatcccatccagactatgaccgaagtccgagccagacaggtgaaggagatgaaccctgctcttggcatcgactgtttgcacaaggggacaaatgatatgaagcaacagcatgtcatagaaaccttgattggcaaaaagcaacagatatctcttgcaacacaaatggttagaatgattttgaagattgatgacattcgtaagcctggagaatctgaagaatgaagacattgagaaaactatgtagcaagatccacttctgtgattaagtaaatggatgtctcgtgatgcgtctacagttatttattgttacatccttttccagacactgtagatgctataataaaaatagctgtttggtaaccatagtttcacttgttcaaagctgtgtaatcgtgggggtactatctcaactgcttttgtattcattgtattaaaagaatctgtttaaacaacctttatcttctcttcgggtttaagaaacgtttattgtaacagtaattaaatgctgccttaattgaaaaaaaaaaaaaataaaaaaaaagaaaaaagaaaaaaaaaaaa

SEQ ID NO: 265 - DNA, 458 bp, Homo sapiens
  misc_feature: Incyte ID No: 337894.8
aaatcactcatttgcaaaacaaaacagtgtacaagaacagcctggtaccgcttgtttatccaaattttcctctgcaagtggagcatctgctaggatcaatagcagcagtgttaagcaggaagctacattctgttcccaaagggatggcgatgcctctttgaataaagccctatcctcaagtgctgatgatgcgtctttggttaatgcctcaatttccagctctgtgaaagctacttctccagtgaaatctactacatctatcactgatgctaaaagttgtgagggacaaaatcctgagctacttccaaaaactcctattagtcctctgaaaacgggggtatcgaaaaccaattgtgaagtcaactttatcccagacagttccatccaaggagaattaagtagagaaatttgtctgcaatctcaatctaagacaaatctacgacaccaggagggaacag

SEQ ID NO: 266 - DNA, 3776 bp, Homo sapiens
  misc_feature: Incyte ID No: 1452351.17
accacgcctgtacctggcctatctttcataggttatataaattccttggttcccagtttttgcagtcttttccaattcagtttaattaatggttaactgtttattcattatcaaaaaaagtacagtgtaatagataagaccatgttactattagaagtatgggtatcatcaaattaagatttttgattctaaaattattaggttccaagaccaaagattaaattaagagaaggtaaagctggacaaaatctgctggaaatgatggcctgtgaccgactgagccaatcagggcacatgttgctaagcttaagtcgtggcaagcaagatttcttaaaagaggttgttgaaacttttgccaacaaaattgggcagtctgcgttatatgatgctctgttttctagtcagtcacctaaggatacatcttttcttggtagcgatgatattggaaaaattgatgtacaagaaccagagcttgaagatttggctagatacgatgttggtgctattcgagcacataatggtagtcttcagcatcttacttggcttggcttacagtggaattcattgcctgctttacctggaatccgaaaatggctaaaacagcttttccatcgtttgccccatgaaacctcaaggcttgaaacaaatgcgcctgaatcaatatgtattttagatcttgaagtatttctccttggagtagtatataccagccacttacaattaaaggagaaatgtaattctcaccatagctcctatcagccgttatgcctgccctttcctgtgtgtaaacagctttgtacagaaagacaaaaatcttggtgggatgcggtttgtactctgattcacagaaaagcagtacctggaaacttggcaaaattgagacttctagttcagcatgaaataaacactctaagagcccaggaaaaacatggccttcaacctgctctgcttgtacattgggcaaaataccttcagaaaacgggcagcggtcttaattctttttatggtcaactagaatacatagggagaagtgttcattattggaagaaagttttgccattgttgaagataataaagaagaacagtattcctgaacctattgatcctctgtttaaacattttcatagtgtagacattcaggcatcagaaattgttgaatatgaagaagacgcacacataacttttgctatgttggatgcagtaaatggaaatatagaagatgctgtgactgcttttgaatctataaaaagtgttgtttcttattggaatcttgcactgatttttcacaggaaggcagaagacattgaaaatgatgccctttctcctgaagaacaagaagaatgcagaaattatctgacaaagaccagggactacctaataaagattatagatgacggtgattcaaatctttcagtggtcaagaaattgcctgtgcccctggagtctgtaaaacagatgcttaattcagtcatgcaggaactcgaagactatagtgaaggaggtcctctctataaaaatggttctttgcgaaatgcagattcagaaataaaacattctacaccatctcctaccaaatattcactatcaccaagtaaaagttacaagtattctcccgaaacaccacctcgatggacagaagatcggaattctttactgaatatgatttgccaacaagtagaggccattaagaaagaaatgcaggagttgaaactaaatagcagtaagtcagcatcccgtcatcgttggcccacagagaattatggaccagactcggtgcctgatggatatcaggggtcacagacatttcatggggctccactaacagttgcaactactggcccttcagtatattatagtcagtcaccagcatataattcccagtatcttctcagaccagcagctaatgttactcccacaaagggttcttctaatacagaatttaagtcaaccaaagaaggattttccatccctgtgtctgctgatggatttaaatttggcatttcggaaccaggaaatcaagaaaagaaaagtgaaaagcctcttgaaaatgatactggcttccaggctcaggatattagtggccagaagaatggccgtggtgtgatttttggccaaacaagtagcacttttacatttgcagatgttgcaaaatcaacttcaggagaaggatttcagtttggcaaaaaagaccccaatttcaagggattttcaggtgctggagaaaaattattctcatcacaatgcggtaaaatggccaataaagcaaacacttccggtgactttgagaaagatgatgatgcctgtaagactgaggacagcgatgacatccattttgaaccagtagttcaaatgcctgaaaaagtagaacttgtaacaggagaagaaggtgaaaaagttctgtattcacagggggtaaaactatttagatttgatgctgagataagtcagtggaaagaaaggggcttggggaacttaaaaattctcaaaaatgaggtcaatggcaaaccaagaatgctgatgcgaagagaccaagtactaaaagtgtgtgctaatcattggataacaactacaatgaacctgaagcccctctctggatcagatagagcatggatgtggttagccagtgatttctctgatggtgatgccaaactagagcggttggcagcacaatttaaaacaccagagctggctgaagaattcaagcagaaatttgaggaatgccagcggcttctgttagacataccacttcaaactccccataaacttgtagatactggcagagctgccaagctaatacagagagctgaagaaatgaagagtggactgaaagatttcaaaacgtttttgacaaatgatcaaacaaaagtcactgaggaagaaaataagggttcaggtacaggtgcagccggtgcctcagacacaacaataaaacccaatcctgaaaacactgggcccacattagaatgggataactatgatttaagggaagatgctttggatgataatgttagtagtagctcagtacatgattctccgttggcaagtagccctgtgagaaaaaatattttccgctttgatgagtcaacaacaggatttaacttcagttttaaatctgctttgagtctatctaagtctcctgccaagttgaatcagagtgggacttcagttggcactgatgaagaatctgatgttactcaagaagaagagagagatggacagtactttgaacctgttgttcctttacctgatctagttgaagtatccagtggtgaggaaaatgaacaagttgtttttagtcacagggcagaactctacagatatgataaagatgttggtcaatggaaagaaaggggcattggtgatataaagattttacagaattatgataataagcaagttcgtatagtgatgagaagggaccaagtattaaaactttgtgccaatcacagaataactccagacatgagtttgcaaaatatgaaagggacagaaagagtatgggtgtggactgcatgtgattttgcagatggagaaagaaaagtagagcatttagctgttcgttttaaactacaggatgttgcagactcatttaagaaaatttttgatgaagcaaaaacagcccaggaaaaagattctttgataacacctcatgtttctcggtcaagcactcccagagagtcaccatgtggcaaaattgctgtagctgtattagaagaaaccacaagagagaggacagatgttattcagggtgatgatgtagcagatgcagcttcaga

SEQ ID NO: 267 - DNA, 1492 bp, Homo sapiens
  misc_feature: Incyte ID No: 1754695cB1
ctgtgcgaaccagacccggcagccttgctcagttcagcatagcggagcgggatccgatcggatcggagcggatcggagcacaccggagcaggctcatcgagaaggcgtctgcgagaccatggagaacggatacacctatgaagattataagaacactgcagaatggcttctgtctcacactaagcaccgacctcaagttgcaataatctgtggttctggattaggaggtctgactgataaattaactcaggcccagatctttgactacagtgaaatccccaactttccccgaagtacagtgccaggtcatgctggccgactggtgtttgggttcctgaatggcagggcctgtgtgatgatgcagggcaggttccacatgtatgaagggtacccactctggaaggtgacattcccagtgagggttttccaccttctgggtgtggacaccctggtagtcaccaatgcagcaggagggctgaaccccaagtttgaggttggagatatcatgctgatccgtgaccatatcaacctacctggtttcagtggtcagaaccctctcagagggcccaatgatgaaaggtttggagatcgtttccctgccatgtctgatgcctacgaccggactatgaggcagagggctctcagtacctggaaacaaatgggggagcaacgtgagctacaggaaggcacctatgtgatggtggcaggccccagctttgagactgtggcagaatgtcgtgtgctgcagaagctgggagcagacgctgttggcatgagtacagtaccagaagttatcgttgcacggcactgtggacttcgagtctttggcttctcactcatcactaacaaggtcatcatggattatgaaagcctggagaaggccaaccatgaagaagtcttagcagctggcaaacaagctgcacagaaattggaacagtttgtctccattcttatggccagcattccactccctgacaaagccagttgacctgccttggagtcgtctggcatctcccacacaagacccaagtagctgctaccttctttggccccttgctggagtcatgtgcctctgtccttaggttgtagcagaaaggaaaagattcctgtccttcacctttcccactttcttctaccagacccttctggtgccagatcctcttctcaaagctgggattacaggtgtgagcatagtgagaccttggcgctacaaaataaagctgttctcattcctgttctttcttacacaagagctggagcccgtgccctaccacacatctgtggagatgcccaggatttgactcgggccttagaactttgcatagcagctgctactagctctttgagataatacattccgaggggctcagttctgccttatctaaatcaccagagaccaaacaaggactaatccaatacctcttggattttatttaatgtcataatgttgtcagaataaagagaaagatgaaataaaaaaccataaaaaagg

SEQ ID NO: 268 - DNA, 5694 bp, Homo sapiens
  misc_feature: Incyte ID No: 232888.4
gcgtctgtggagaagcggcttggtcgggggtggtctcgtggggtcctgcctgtttagtcgctttcagggttcttgagccccttcacgaccgtcaccatggaagtgtcaccattgcagcctgtaaatgaaaatatgcaagtcaacaaaataaagaaaaatgaagatgctaagaaaagactgtctgttgaaagaatctatcaaaagaaaacacaattggaacatattttgctccgcccagacacctacattggttctgtggaattagtgacccagcaaatgtgggtttacgatgaagatgttggcattaactatagggaagtcacttttgttcctggtttgtacaaaatctttgatgagattctagttaatgctgcggacaacaaacaaagggacccaaaaatgtcttgtattagagtcacaattgatccggaaaacaatttaattagtatatggaataatggaaaaggtattcctgttgttgaacacaaagttgaaaagatgtatgtcccagctctcatatttggacagctcctaacttctagtaactatgatgatgatgaaaagaaagtgacaggtggtcgaaatggctatggagccaaattgtgtaacatattcagtaccaaatttactgtggaaaacagccagtagagaatacaagaaaatgttcaaacagacatggatggataatatgggaagagctggtgagatggaactcaagcccttcaatggagaagattatacatgtatcacctttcagcctgatttgtctaagtttaaaatgcaaagcctggacaaagatattgttgcactaatggtcagaagagcatatgatattgctggatccaccaaagatgtcaaagtctttcttaatggaaataaactgccagtaaaaggatttcgtagttatgtggacatgtatttgaaggacaagttggatgaaactggtaactccttgaaagtaatacatgaacaagtaaaccacaggtgggaagtgtgtttaactatgagtgaaaaaggctttcagcaaattagctttgtcaacagcattgctacatccaagggtggcagacatgttgattatgtagctgatcagattgtgactaaacttgttgatgttgtgaagaagaagaacaagggtggtgttgcagtaaaagcacatcaggtgaaaaatcacatgtggatttttgtaaatgccttaattgaaaacccaacctttgactctcagacaaaagaaaacatgactttacaacccaagagctttggatcaacatgccaattgagtgaaaaatttatcaaagctgccattggctgtggtattgtagaaagcatactaaactgggtgaagtttaaggcccaagtccagttaaacaagaagtgttcagctgtaaaacataatagaatcaagggaattcccaaactcgatgatgccaatgatgcagggggccgaaactccactgagtgtacgcttatcctgactgagggagattcagccaaaactttggctgtttcaggccttggtgtggttgggagagacaaatatggggttttccctcttagaggaaaaatactcaatgttcgagaagcttctcataagcagatcatggaaaatgctgagattaacaatatcatcaagattgtgggtcttcagtacaagaaaaactatgaagatgaagattcattgaagacgcttcgttatgggaagataatgattatgacagatcaggaccaagatggttcccacatcaaaggcttgctgattaattttatccatcacaactggccctctcttctgcgacatcgttttctggaggaatttatcactcccattgtaaaggtatctaaaaacaagcaagaaatggcattttacagccttcctgaatttgaagagtggaagagttctactccaaatcataaaaaatggaaagtcaaatattacaaaggtttgggcaccagcacatcaaaggaagctaaagaatactttgcagatatgaaaagacatcgtatccagttcaaatattctggtcctgaagatgatgctgctatcagcctggcctttagcaaaaaacagatagatgatcgaaaggaatggttaactaatttcatggaggatagaagacaacgaaagttacttgggcttcctgaggattacttgtatggacaaactaccacatatctgacatataatgacttcatcaacaaggaacttatcttgttctcaaattctgataacgagagatctatcccttctatggtggatggtttgaaaccaggtcagagaaaggttttgtttacttgcttcaaacggaatgacaagcgagaagtaaaggttgcccaattagctggatcagtggctgaaatgtcttcttatcatcatggtgagatgtcactaatgatgaccattatcaatttggctcagaattttgtgggtagcaataatctaaacctcttgcagcccattggtcagtttggtaccaggctacatggtggcaaggattctgctagtccacgatacatctttacaatgctcagctctttggctcgattgttatttccaccaaaagatgatcacacgttgaagtttttatatgatgacaaccagcgtgttgagcctgaatggtacattcctattattcccatggtgctgataaatggtgctgaaggaatcggtactgggtggtcctgcaaaatccccaactttgatgtgcgtgaaattgtaaataacatcaggcgtttgatggatggagaagaacctttgccaatgcttccaagttacaagaacttcaagggtactattgaagaactggctccaaatcaatatgtgattagtggtgaagtagctattcttaattctacaaccattgaaatctcagagcttcccgtcagaacatggacccagacatacaaagaacaagttctagaacccatgttgaatggcaccgagaagacacctcctctcataacagactatagggaataccatacagataccactgtgaaatttgttgtgaagatgactgaagaaaaactggcagaggcagagagagttggactacacaaagtcttcaaactccaaactagtctcacatgcaactctatggtgctttttgaccacgtaggctgtttaaagaaatatgacacggtgttggatattctaagagacttttttgaactcagacttaaatattatggattaagaaaagaatggctcctaggaatgcttggtgctgaatctgctaaactgaataatcaggctcgctttatcttagagaaaatagatggcaaaataatcattgaaaataagcctaagaaagaattaattaaagttctgattcagaggggatatgattcggatcctgtgaaggcctggaaagaagcccagcaaaaggttccagatgaagaagaaaatgaagagagtgacaacgaaaaggaaactgaaaagagtgactccgtaacagattctggaccaaccttcaactatcttcttgatatgcccctttggtatttaaccaaggaaaagaaagatgaactctgcaggctaagaaatgaaaaagaacaagagctggacacattaaaaagaaagagtccatcagatttgtggaaagaagacttggctacatttattgaagaattggaggctgttgaagccaaggaaaaacaagatgaacaagtcggacttcctgggaaaggggggaaggccaagggaaaaaaaacacaaatggctgaagttttgccttctccgcgtggtcaaagagtcattccacgaataaccatagaaatgaaagcagaggcagaaaagaaaaataaaaagaaaattaagaatgaaaatactgaaggaagccctcaagaagatggtgtggaactagaaggcctaaaacaaagattagaaaagaaacagaaaagagaaccaggtacaaagacaaagaaacaaactacattggcatttaagccaatcaaaaaaggaaagaagagaaatccctggtctgattcagaatcagataggagcagtgacgaaagtaattttgatgtccctccacgagaaacagagccacggagagcagcaacaaaaacaaaattcacaatggatttggattcagatgaagatttctcagattttgatgaaaaaactgatgatgaagattttgtcccatcagatgctagtccacctaagaccaaaacttccccaaaacttagtaacaaagaactgaaaccacagaaaagtgtcgtgtcagaccttgaagctgatgatgttaagggcagtgtaccactgtcttcaagccctcctgctacacatttcccagatgaaactgaaattacaaacccagttcctaaaaagaatgtgacagtgaagaagacagcagcaaaaagtcagtcttccacctccactaccggtgccaaaaaaagggctgccccaaaaggaactaaaagggatccagctttgaattctggtgtctctcaaaagcctgatcctgccaaaaccaagaatcgccgcaaaaggaagccatccacttctgatgattctgactctaattttgagaaaattgtttcgaaagcagtcacaagcaagaaatccaagggggagagtgatgacttccatatggactttgactcagctgtggctcctcgggcaaaatctgtacgggcaaagaaacctataaagtacctggaagagtcagatgaagatgatctgttttaaaatgtgaggcgattattttaagtaattatcttaccaagcccaagactggttttaaagttacctgaagctcttaacttcctcccctctgaatttagtttggggaaggtgtttttagtacaagacatcaaagtgaagtaaagcccaagtgttctttagctttttataatactgtctaaatagtgaccatctcatgggcattgttttcttctctgctttgtctgtgttttgagtctgctttcttttgtctttaaaacctgatttttaagttcttctgaactgtagaaatagctatctgatcacttcagcgtaaagcagtgtgtttattaaccatccactaagctaaaactagagcagtttgatttaaaagtgtcactcttcctccttttctactttcagtagatatgagatagagcataattatctgttttatcttagttttatacataatttaccatcagatagaactttatggttctagtacagatactctactacactcagcctcttatgtgccaagtttttctttaagcaatgagaaattgctcatgttcttcatcttctcaaatcatcagaggccgaagaaaaacactttggctgtgtctataacttgacacagtcaatagaatgaagaaaattagagtagttatgtgattatttcagctcttgacctgtcccctctggctgcctctgagtctgaatctcccaaagagagaaaccaatttctaagaggactggattgcagaagactcggggacaacatttgatccaagatcttaaatgttatattgataaccatgctcagcaatgagctattagattcattttgggaaatctccataatttcaatttgtaaactttgttaagacctgtctacattgttatatgtgtgtgacttgagtaatgttatcaacgtttttgtaaatatttactatgtttttctattagctaaattccaacaattttgtactttaataaaatgttctaaacattgcaacccaaaa

SEQ ID NO: 269 - DNA, 5841 bp, Homo sapiens
  misc_feature: Incyte ID No: 247817.4
actgagtcccgggaccccgggagagcggtcagtgtgtggtcgctgcgtttcctctgcctgcgccgggcatcacttgcgcgccgcagaaagtccgtctggcagcctggatatcctctcctaccggcacccgcagacgcccctgcagccgcggtcggcgcccgggctccctagccctgtgcgctcaactgtcctgcgctgcggggtgccgcgagttccacctccgcgcctccttctctagacaggcgctgggagaaagaaccggctcccgagttctgggcatttcgcccggctcgaggtgcaggatgcagagcaaggtgctgctggccgtcgccctgtggctctgcgtggagacccgggccgcctctgtgggtttgcctagtgtttctcttgatctgcccaggctcagcatacaaaaagacatacttacaattaaggctaatacaactcttcaaattacttgcaggggacagagggacttggactggctttggcccaataatcagagtggcagtgagcaaagggtggaggtgactgagtgcagcgatggcctcttctgtaagacactcacaattccaaaagtgatcggaaatgacactggagcctacaagtgcttctaccgggaaactgacttggcctcggtcatttatgtctatgttcaagattacagatctccatttattgcttctgttagtgaccaacatggagtcgtgtacattactgagaacaaaaacaaaactgtggtgattccatgtctcgggtccatttcaaatctcaacgtgtcactttgtgcaagatacccagaaaagagatttgttcctgatggtaacagaatttcctgggacagcaagaagggctttactattcccagctacatgatcagctatgctggcatggtcttctgtgaagcaaaaattaatgatgaaagttaccagtctattatgtacatagttgtcgttgtagggtataggatttatgatgtggttctgagtccgtctcatggaattgaactatctgttggagaaaagcttgtcttaaattgtacagcaagaactgaactaaatgtggggattgacttcaactgggaatacccttcttcgaagcatcagcataagaaacttgtaaaccgagacctaaaaacccagtctgggagtgagatgaagaaatttttgagcaccttaactatagatggtgtaacccggagtgaccaaggattgtacacctgtgcagcatccagtgggctgatgaccaagaagaacagcacatttgtcagggtccatgaaaaaccttttgttgcttttggaagtggcatggaatctctggtggaagccacggtgggggagcgtgtcagaatccctgcgaagtaccttggttacccacccccagaaataaaatggtataaaaatggaataccccttgagtccaatcacacaattaaagcggggcatgtactgacgattatggaagtgagtgaaagagacacaggaaattacactgtcatccttaccaatcccatttcaaaggagaagcagagccatgtggtctctctggttgtgtatgtcccaccccagattggtgagaaatctctaatctctcctgtggattcctaccagtacggcaccactcaaacgctgacatgtacggtctatgccattcctcccccgcatcacatccactggtattggcagttggaggaagagtgcgccaacgagcccagccaagctgtctcagtgacaaacccatacccttgtgaagaatggagaagtgtggaggacttccagggaggaaataaaattgaagttaataaaaatcaatttgctctaattgaaggaaaaaacaaaactgtaagtacccttgttatccaagcggcaaatgtgtcagctttgtacaaatgtgaagcggtcaacaaagtcgggagaggagagagggtgatctccttccacgtgaccaggggtcctgaaattactttgcaacctgacatgcagcccactgagcaggagagcgtgtctttgtggtgcactgcagacagatctacgtttgagaacctcacatggtacaagcttggcccacagcctctgccaatccatgtgggagagttgcccacacctgtttgcaagaacttggatactctttggaaattgaatgccaccatgttctctaatagcacaaatgacattttgatcatggagcttaagaatgcatccttgcaggaccaaggagactatgtctgccttgctcaagacaggaagaccaagaaaagacattgcgtggtcaggcagctcacagtcctagagcgtgtggcacccacgatcacaggaaacctggagaatcagacgacaagtattggggaaagcatcgaagtctcatgcacggcatctgggaattccccctccacagatcatgtggtttaaagataatgagacccttgtagaagactcaggcattgtattgaaggatgggaaccggaacctcactatccgcagagtgaggaaggaggacgaaggcctctacacctgccaggcatgcagtgttcttggctgtgcaaaagtggaggcatttttcataatagaaggtgcccaggaaaagacgaacttggaaatcattattctagtaggcacggcggtgattgccatgttcttctggctacttcttgtcatcatcctacggaccgttaagcgggccaatggaggggaactgaagacaggctacttgtccatcgtcatggatccagatgaactcccattggatgaacattgtgaacgactgccttatgatgccagcaaatgggaattccccagagaccggctgaagctaggtaagcctcttggccgtggtgcctttggccaagtgattgaagcagatgcctttggaattgacaagacagcaacttgcaggacagtagcagtcaaaatgttgaaagaaggagcaacacacagtgagcatcgagctctcatgtctgaactcaagatcctcattcatattggtcaccatctcaatgtggtcaaccttctaggtgcctgtaccaagccaggagggccactcatggtgattgtggaattctgcaaatttggaaacctgtccacttacctgaggagcaagagaaatgaatttgtcccctacaagaccaaaggggcacgattccgtcaagggaaagactacgttggagcaatccctgtggatctgaaacggcgcttggacagcatcaccagtagccagagctcagccagctctggatttgtggaggagaagtccctcagtgatgtagaagaagaggaagctcctgaagatctgtataaggacttcctgaccttggagcatctcatctgttacagcttccaagtggctaagggcatggagttcttggcatcgcgaaagtgtatccacagggacctggcggcacgaaatatcctcttatcggagaagaacgtggttaaaatctgtgactttggcttggcccgggatatttataaagatccagattatgtcagaaaaggagatgctcgcctccctttgaaatggatggccccagaaacaatttttgacagagtgtacacaatccagagtgacgtctggtcttttggtgttttgctgtgggaaatattttccttaggtgcttctccatatcctggggtaaagattgatgaagaattttgtaggcgattgaaagaaggaactagaatgagggcccctgattatactacaccagaaatgtaccagaccatgctggactgctggcacggggagcccagtcagagacccacgttttcagagttggtggaacatttgggaaatctcttgcaagctaatgctcagcaggatggcaaagactacattgttcttccgatatcagagactttgagcatggaagaggattctggactctctctgcctacctcacctgtttcctgtatggaggaggaggaagtatgtgaccccaaattccattatgacaacacagcaggaatcagtcagtatctgcagaacagtaagcgaaagagccggcctgtgagtgtaaaaacatttgaagatatcccgttagaagaaccagaagtaaaagtaatcccagatgacaaccagacggacagtggtatggttcttgcctcagaagagctgaaaactttggaagacagaaccaaattatctccatcttttggtggaatggtgcccagcaaaagcagggagtctgtggcatctgaaggctcaaaccagacaagcggctaccagtccggatatcactccgatgacacagacaccaccgtgtactccagtgaggaagcagaacttttaaagctgatagagattggagtgcaaaccggtagcacagcccagattctccagcctgactcggggaccacactgagctctcctcctgtttaaaaggaagcatccacacccccaactcccggacatcacatgagaggtgctgctcagattttcaagtgttgttctttccaccagcaggaagtagccgcatttgattttcatttcgacaacagaaaaaggacctcggactgcagggagccagtcttctaggcatatcctggaagaggcttgtgacccaagaatgtgtctgtgtcttctcccagtgttgacctgatcctctttttcattcatttaaaaagcatttatcatgccccctgctgcgggtctcaccatgggtttagaacaaagacgttcaagaaatggccccatcctcaaagaagtagcagtacctggggagctgacacttctgtaaaactagaagataaaccaggcaatgtaagtgttcgaggtgttgaagatgggaaggatttgcagggctgagtctatccaagaggctttgtttaggacgtgggtcccaagccaagccttaagtgtggaattcggattgatagaaaggaagactaacgttaccttgctttggagagtactggagcctgcaaatgcattgtgtttgctctggtggaggtgggcatggggtctgttctgaaatgtaaagggttcagacggggtttctggttttagaaggttgcgtgttcttcgagttgggctaaagtagagttcgttgtgctgtttctgactcctaatgagagttccttccagaccgttacgtgtctcctggccaagccccaggaaggaaatgatgcagctctggctccttgtctcccaggctgatcctttattcagaataccacaaagaaaggacattcagctcaaggctccctgccgtgttgaagagttctgactgcacaaaccagcttctggtttcttctggaatgaataccctcatatctgtcctgatgtgatatgtctgagactgaatgcgggaggttcaatgtgaagctgtgtgtggtgtcaaagtttcaggaaggattttacccttttgttcttccccctgtccccaacccactctcaccccgcaacccatcagtattttagttatttggcctctactccagtaaacctgattgggtttgttcactctctgaatgattattagccagacttcaaaattattttatagcccaaattataacatctattgtattatttagacttttaacatatagagctatttctactgatttttgcccttgttctgtcctttttttcaaaaaagaaaatgtgttttttgtttggtaccatagtgtgaaatgctgggaacaatgactataagacatgctatggcacatatatttatagtctgtttatgtagaaacaaatgtaatatattaaagccttatatataatgaactttgtactattcacattttgtatcagtattatgtagcataacaaaggtcataatgctttcagcaattgatgtcattttattaaagaacattgaaaaacttgaaggaaaaa

SEQ ID NO: 270 - DNA, 1979 bp, Homo sapiens
  misc_feature: Incyte ID No: 365801.2
aaaaatgagatctcaatagcagcgggctgggcacatcctctcctctctccttctctctctgcccggagctggtttccgtctctcggctcggggctggaactccggcccaacctaggcgcgcagccgccacgagatggcgcacttccgatcaatgtcaaagccgccggggagccgggaaccccagcatgattcttggcctttgttcgcttctgatactaagagcagcacggtacattatttcacttgtcccgctccccttcataacagaaaaaggggactcaccctcaagaagtgattggtatggtaatttaaagcaacgcgcattcgctaggcctcgcgagcgtcgccgcgcggagaagccagctgtcccttggcagtgatttcggaaatgtgtcaaggcaattccaaaggtgaaaacgcagccaactggctcacggcaaagagtggtcggaagaagcgctgcccctacacgaagcaccagacactggagctggagaaggagtttctgttcaatatgtaccttactcgagagcggcgcctagagattagccgcagcgtccacctcacggacagacaagtgaaaatctggtttcagaaccgcaggatgaaactgaagaaaatgaatcgagaaaaccggatccgggagctcacagccaactttaatttttcctgatgaatctccaggcgacgcggttttttcacttcccgagcgctggtcccctccctctgtcttcaggctctgcccaggaactcgcacctgtgctggagccctgttcctccctcccacactcgccatctcctgggccgttacatctgtgcagggctggtttgttctgactttttgtttctttgtgtttgcttggtgctggtttatttgttgttttctgggggaaaaagccatatcatgctaaaattctatagagatagatattgtcctaagtgtcaagtcctgactgggctgggtttgctgtcttggggtcccactgctcgaaatggcccctgtcttcggccgagctggtttcctgcccagcctggggcaaacctagccggaaggccgaggtcccattgttggcgctgaggtgtctggcctgaggtcaatggtgcaaaggagccgccaccgggcatgtctgcctggagtgctgtgctgtgtttaatcaggggatacaggcccctgggtttcttttttctttcttcctttcttccttggccaagagaagggcttacaggcatggacatgcaggttggcaaacgggcttgactttggctgatttaaaaagtgagaaagaaagtaaaaaaggttaatttttccttcctctgtaagatatcccagctttaaaaagaaaaaaaaagaattaccaagagaaggggacttctcttccagtttctgtaaggtcttacattgcctgactaaaatgtttcatttacctctaaatttccatatccttctggctgtagataaataatgtagttttgtttatgcatttggaattagtggatttttttgtcattaaaattgttaccactggtaacatgtgacaagcacaccacaattctccctatcttgtgaagttgtttttttaaatcgccttgaacaaaaagttttttttttgtttgtttttgctttctgaaattcacagaagcctaggaggactggggtaagcggaataaactagagaagggagacattgtttggatttcctttatactgtgaagttacatgcataaaagggtcaaacctgtagatgcagaaaaagaaaaaaaactataaatacaaatctgtataaatgtctattattatgaagaattgccaatcttgttttaagcaaatgcattctatcgttattataaatgttagttctagctctatttacttctaatcttaaatcagaataaattaatattgtattgctgctgtgcgtggaaaaagacgatgtttatgttcttatagaataaaagctgtggaatgaagctttttaaaa

SEQ ID NO: 271 - DNA, 1283 bp, Homo sapiens
  misc_feature: Incyte ID No: 1449816.11
ctgtgggtgagaggtctctttcagaggccacatgccatgtctgtggtgcagaaagtgttcttgatcacagtgcctctggggtgggggggcgggcacccagcccgtgcgtcaaggcccacctatctgagcggcagggtagggccatgctttcaggaggggcagtagtgatggctccgaggaacgtcttgtctgccagagctgcctgcccttgctgtgagcgcagccccacgtctacctaagggagggatgtgacaggggcgaggacttctggtgccttctcaggtggcccgctgcaagcagctgatctgtgaccccagctacatcccggaccgtgtgcggaaggctggccaggttatccgcatcatctgtatccttagccaccccatcaagaacaccaacgacgccaactcctgccaaataatcatcccccagaaccaggtcaacaggaagtcaggtaggccgggcgctggtacagcttcctctagggtgttctctttggggttactctttttctccccatcagtgtgggagctccctgccttacctctctggaaaaaaatttgagccacattgtagccaccacaacttggagccctagggtttgggtggcctggactctttccctctgggagggtggcggcttggatgctacctgctctgcggggctggggaggggcagtcgggccagacttgtgtccagccactggaacccctctctgcgtatggccagcgcctctggcctgagttgacggagctcttcctgtggccagacatctacgtgtgcatgatctcctatgcacacaacgtggcggcccagggcaagtacatagctattgccagcactactgtggagaccacggaccctgaaaaggaggtggagccggctctggagctgttggagcccattgaccagaagtttgtggctatcagtgacttgtatgagcccattgatgatggttgtgagagccaggtgctctgttcctgctcctacgatgccaccacacactttgagacaacctgcaacgacatcaaagacatctacaaacgcatggctggcacggcctttgactttgagaacatgaagcgcaaacagaacgacgtctttggagaagctgagcagtgattgtggccgcccccagcccctgctgccccagcctgtgtctgttctcctcgagggctccagcatcctctgcttcccccaccacgttcccatcacccacctcattgatccactgaccaaatccttaaccctagcgatggcttgggagatggggggttggata

What is claimed is:

1. A combination comprising a plurality of cDNAs wherein the cDNAs are SEQ ID NOs:1-292 that are differentially expressed in vascular endothelium and the complements of SEQ ID NOs:1-292.

2. The combination of claim 1 wherein the cDNAs are SEQ ID NOs:1-209 that are expressed at a higher level in vascular endothelium from microvasculature and the complements of SEQ ID NOs:1-209.

3. The combination of claim 1, wherein the cDNAs are SEQ ID NOs:210-292 that are expressed at a higher level in vascular endothelium from non-microvasculature and the complements of SEQ ID NOs:210-292.

4. The combination of claim 1, wherein the vascular endothelium is from a subject with a vascular disorder.

5. The combination of claim 4, wherein the vascular disorder is selected from atherosclerosis, hemangioma, hemangioendothelioma, diabetic retinopathy, warts, pyogenic granulomas, Kaposi's sarcoma, scar keloids, allergic oedema, neoplasms, psoriasis, ulcers, follicular cysts, endometriosis, peritoneal sclerosis, and obesity.

6. The combination of claim 1, wherein the cDNAs are immobilized on a substrate.

7. A method for detecting differential expression of one or more cDNAs in a sample containing nucleic acids, the method comprising:
a) hybridizing the substrate of claim 6 with nucleic acids of the sample, thereby forming one or more hybridization complexes;
b) detecting the hybridization complexes; and
c) comparing the hybridization complexes with those of a standard, wherein differences between the standard and sample hybridization complexes indicate differential expression of cDNAs in the sample.

8. The method of claim 7, where in the nucleic acids of the sample are amplified prior to hybridization.

9. The method of claim 7, wherein the sample is from a subject with a vascular disorder and comparison with a standard defines an early, mid, or late stage of that disease or monitors efficacy of a therapeutic regime.

10. A method of screening a plurality of molecules or compounds to identify a molecule or compound which specifically binds a cDNA, the method comprising:
a) combining the combination of claim 1 with the plurality of molecules or compounds under conditions to allow specific binding; and
b) detecting specific binding between each cDNA and at least one molecule or compound, thereby identifying a molecule or compound that specifically binds to each cDNA.

11. The method of claim 10 wherein the plurality of molecules or compounds are selected from DNA molecules, enhancers, mimetics, peptide nucleic acids, proteins, repressors, regulatory proteins, RNA molecules, and transcription factors.

12. An isolated cDNA selected from SEQ ID NOs:36, 51, 61, 83, 87, 110, 111, 136, 159, 198, and 244.

13. A vector containing the cDNA of claim 12.

14. A host cell containing the vector of claim 13.

15. A method for producing a protein, the method comprising the steps of:
a) culturing the host cell of claim 14 under conditions for expression of protein; and
b) recovering the protein from the host cell culture.

16. A protein or a portion thereof produced by the method of claim 15.

17. A method for using a protein to screen a plurality of molecules or compounds to identify at least one ligand which specifically binds the protein, the method comprising:
a) combining the protein of claim 16 with the plurality of molecules or compounds under conditions to allow specific binding; and
b) detecting specific binding between the protein and a molecule or compound, thereby identifying a ligand which specifically binds the protein.

18. The method of claim 17 wherein the plurality of molecules or compounds is selected from agonists, antagonists, antibodies, DNA molecules, small molecule drugs, immunoglobulins, inhibitors, mimetics, peptide nucleic acids, peptides, pharmaceutical agents, proteins, RNA molecules, and ribozymes.

19. A method of using a protein to produce an antibody which specifically binds the protein, the method comprising:
a) immunizing an animal with the protein of claim 16 under conditions to elicit an antibody response;
b) isolating animal antibodies; and
c) screening the isolated antibodies with the protein, thereby identifying an antibody which specifically binds the protein.

20. An antibody produced by the method of claim 19.
